United States Patent Application Publication US 2026/0258423 A1 - sequence listing, part 38

SEQ ID NO: 275318 - DNA, 20 bp, synthetic construct
  source 1..20: mol_type = other DNA
acacaccctctgctgcccca

SEQ ID NO: 275319 - DNA, 20 bp, synthetic construct
  source 1..20: mol_type = other DNA
cacacaccctctgctgcccc

SEQ ID NO: 275320 - DNA, 20 bp, synthetic construct
  source 1..20: mol_type = other DNA
acacacaccctctgctgccc

SEQ ID NO: 275321 - DNA, 20 bp, synthetic construct
  source 1..20: mol_type = other DNA
aacacacaccctctgctgcc

SEQ ID NO: 275322 - DNA, 20 bp, synthetic construct
  source 1..20: mol_type = other DNA
gaacacacaccctctgctgc

SEQ ID NO: 275323 - DNA, 20 bp, synthetic construct
  source 1..20: mol_type = other DNA
tgaacacacaccctctgctg

SEQ ID NO: 275324 - DNA, 20 bp, synthetic construct
  source 1..20: mol_type = other DNA
ctgaacacacaccctctgct

SEQ ID NO: 275325 - DNA, 20 bp, synthetic construct
  source 1..20: mol_type = other DNA
gctgaacacacaccctctgc

SEQ ID NO: 275326 - DNA, 20 bp, synthetic construct
  source 1..20: mol_type = other DNA
tgctgaacacacaccctctg

SEQ ID NO: 275327 - DNA, 20 bp, synthetic construct
  source 1..20: mol_type = other DNA
gtgctgaacacacaccctct

SEQ ID NO: 275328 - DNA, 20 bp, synthetic construct
  source 1..20: mol_type = other DNA
agtgctgaacacacaccctc

SEQ ID NO: 275329 - DNA, 20 bp, synthetic construct
  source 1..20: mol_type = other DNA
tagtgctgaacacacaccct

SEQ ID NO: 275330 - DNA, 20 bp, synthetic construct
  source 1..20: mol_type = other DNA
ttagtgctgaacacacaccc

SEQ ID NO: 275331 - DNA, 20 bp, synthetic construct
  source 1..20: mol_type = other DNA
cttagtgctgaacacacacc

SEQ ID NO: 275332 - DNA, 20 bp, synthetic construct
  source 1..20: mol_type = other DNA
ccttagtgctgaacacacac

SEQ ID NO: 275333 - DNA, 20 bp, synthetic construct
  source 1..20: mol_type = other DNA
cccttagtgctgaacacaca

SEQ ID NO: 275334 - DNA, 20 bp, synthetic construct
  source 1..20: mol_type = other DNA
ccccttagtgctgaacacac

SEQ ID NO: 275335 - DNA, 20 bp, synthetic construct
  source 1..20: mol_type = other DNA
accccttagtgctgaacaca

SEQ ID NO: 275336 - DNA, 20 bp, synthetic construct
  source 1..20: mol_type = other DNA
caccccttagtgctgaacac

SEQ ID NO: 275337 - DNA, 20 bp, synthetic construct
  source 1..20: mol_type = other DNA
acaccccttagtgctgaaca

SEQ ID NO: 275338 - DNA, 20 bp, synthetic construct
  source 1..20: mol_type = other DNA
cacaccccttagtgctgaac

SEQ ID NO: 275339 - DNA, 20 bp, synthetic construct
  source 1..20: mol_type = other DNA
tcacaccccttagtgctgaa

SEQ ID NO: 275340 - DNA, 20 bp, synthetic construct
  source 1..20: mol_type = other DNA
ttcacaccccttagtgctga

SEQ ID NO: 275341 - DNA, 20 bp, synthetic construct
  source 1..20: mol_type = other DNA
cttcacaccccttagtgctg

SEQ ID NO: 275342 - DNA, 20 bp, synthetic construct
  source 1..20: mol_type = other DNA
gcttcacaccccttagtgct

SEQ ID NO: 275343 - DNA, 20 bp, synthetic construct
  source 1..20: mol_type = other DNA
agcttcacaccccttagtgc

SEQ ID NO: 275344 - DNA, 20 bp, synthetic construct
  source 1..20: mol_type = other DNA
aagcttcacaccccttagtg

SEQ ID NO: 275345 - DNA, 20 bp, synthetic construct
  source 1..20: mol_type = other DNA
caagcttcacaccccttagt

SEQ ID NO: 275346 - DNA, 20 bp, synthetic construct
  source 1..20: mol_type = other DNA
tcaagcttcacaccccttag

SEQ ID NO: 275347 - DNA, 20 bp, synthetic construct
  source 1..20: mol_type = other DNA
ctcaagcttcacacccctta

SEQ ID NO: 275348 - DNA, 20 bp, synthetic construct
  source 1..20: mol_type = other DNA
gctcaagcttcacacccctt

SEQ ID NO: 275349 - DNA, 20 bp, synthetic construct
  source 1..20: mol_type = other DNA
cgctcaagcttcacacccct

SEQ ID NO: 275350 - DNA, 20 bp, synthetic construct
  source 1..20: mol_type = other DNA
gcgctcaagcttcacacccc

SEQ ID NO: 275351 - DNA, 20 bp, synthetic construct
  source 1..20: mol_type = other DNA
agcgctcaagcttcacaccc

SEQ ID NO: 275352 - DNA, 20 bp, synthetic construct
  source 1..20: mol_type = other DNA
tagcgctcaagcttcacacc

SEQ ID NO: 275353 - DNA, 20 bp, synthetic construct
  source 1..20: mol_type = other DNA
ctagcgctcaagcttcacac

SEQ ID NO: 275354 - DNA, 20 bp, synthetic construct
  source 1..20: mol_type = other DNA
cctagcgctcaagcttcaca

SEQ ID NO: 275355 - DNA, 20 bp, synthetic construct
  source 1..20: mol_type = other DNA
tcctagcgctcaagcttcac

SEQ ID NO: 275356 - DNA, 20 bp, synthetic construct
  source 1..20: mol_type = other DNA
ctcctagcgctcaagcttca

SEQ ID NO: 275357 - DNA, 20 bp, synthetic construct
  source 1..20: mol_type = other DNA
tctcctagcgctcaagcttc

SEQ ID NO: 275358 - DNA, 20 bp, synthetic construct
  source 1..20: mol_type = other DNA
ctctcctagcgctcaagctt

SEQ ID NO: 275359 - DNA, 20 bp, synthetic construct
  source 1..20: mol_type = other DNA
actctcctagcgctcaagct

SEQ ID NO: 275360 - DNA, 20 bp, synthetic construct
  source 1..20: mol_type = other DNA
aactctcctagcgctcaagc

SEQ ID NO: 275361 - DNA, 20 bp, synthetic construct
  source 1..20: mol_type = other DNA
gaactctcctagcgctcaag

SEQ ID NO: 275362 - DNA, 20 bp, synthetic construct
  source 1..20: mol_type = other DNA
tgaactctcctagcgctcaa

SEQ ID NO: 275363 - DNA, 20 bp, synthetic construct
  source 1..20: mol_type = other DNA
gtgaactctcctagcgctca

SEQ ID NO: 275364 - DNA, 20 bp, synthetic construct
  source 1..20: mol_type = other DNA
tgtgaactctcctagcgctc

SEQ ID NO: 275365 - DNA, 20 bp, synthetic construct
  source 1..20: mol_type = other DNA
gtgtgaactctcctagcgct

SEQ ID NO: 275366 - DNA, 20 bp, synthetic construct
  source 1..20: mol_type = other DNA
agtgtgaactctcctagcgc

SEQ ID NO: 275367 - DNA, 20 bp, synthetic construct
  source 1..20: mol_type = other DNA
cagtgtgaactctcctagcg

SEQ ID NO: 275368 - DNA, 20 bp, synthetic construct
  source 1..20: mol_type = other DNA
ccagtgtgaactctcctagc

SEQ ID NO: 275369 - DNA, 20 bp, synthetic construct
  source 1..20: mol_type = other DNA
gccagtgtgaactctcctag

SEQ ID NO: 275370 - DNA, 20 bp, synthetic construct
  source 1..20: mol_type = other DNA
tgccagtgtgaactctccta

SEQ ID NO: 275371 - DNA, 20 bp, synthetic construct
  source 1..20: mol_type = other DNA
ctgccagtgtgaactctcct

SEQ ID NO: 275372 - DNA, 20 bp, synthetic construct
  source 1..20: mol_type = other DNA
tctgccagtgtgaactctcc

SEQ ID NO: 275373 - DNA, 20 bp, synthetic construct
  source 1..20: mol_type = other DNA
ttctgccagtgtgaactctc

SEQ ID NO: 275374 - DNA, 20 bp, synthetic construct
  source 1..20: mol_type = other DNA
cttctgccagtgtgaactct

SEQ ID NO: 275375 - DNA, 20 bp, synthetic construct
  source 1..20: mol_type = other DNA
tcttctgccagtgtgaactc

SEQ ID NO: 275376 - DNA, 20 bp, synthetic construct
  source 1..20: mol_type = other DNA
ctcttctgccagtgtgaact

SEQ ID NO: 275377 - DNA, 20 bp, synthetic construct
  source 1..20: mol_type = other DNA
tctcttctgccagtgtgaac

SEQ ID NO: 275378 - DNA, 20 bp, synthetic construct
  source 1..20: mol_type = other DNA
ctctcttctgccagtgtgaa

SEQ ID NO: 275379 - DNA, 20 bp, synthetic construct
  source 1..20: mol_type = other DNA
cctctcttctgccagtgtga

SEQ ID NO: 275380 - DNA, 20 bp, synthetic construct
  source 1..20: mol_type = other DNA
acctctcttctgccagtgtg

SEQ ID NO: 275381 - DNA, 20 bp, synthetic construct
  source 1..20: mol_type = other DNA
aacctctcttctgccagtgt

SEQ ID NO: 275382 - DNA, 20 bp, synthetic construct
  source 1..20: mol_type = other DNA
caacctctcttctgccagtg

SEQ ID NO: 275383 - DNA, 20 bp, synthetic construct
  source 1..20: mol_type = other DNA
ccaacctctcttctgccagt

SEQ ID NO: 275384 - DNA, 20 bp, synthetic construct
  source 1..20: mol_type = other DNA
cccaacctctcttctgccag

SEQ ID NO: 275385 - DNA, 20 bp, synthetic construct
  source 1..20: mol_type = other DNA
ccccaacctctcttctgcca

SEQ ID NO: 275386 - DNA, 20 bp, synthetic construct
  source 1..20: mol_type = other DNA
gccccaacctctcttctgcc

SEQ ID NO: 275387 - DNA, 20 bp, synthetic construct
  source 1..20: mol_type = other DNA
tgccccaacctctcttctgc

SEQ ID NO: 275388 - DNA, 20 bp, synthetic construct
  source 1..20: mol_type = other DNA
ctgccccaacctctcttctg

SEQ ID NO: 275389 - DNA, 20 bp, synthetic construct
  source 1..20: mol_type = other DNA
gctgccccaacctctcttct

SEQ ID NO: 275390 - DNA, 20 bp, synthetic construct
  source 1..20: mol_type = other DNA
agctgccccaacctctcttc

SEQ ID NO: 275391 - DNA, 20 bp, synthetic construct
  source 1..20: mol_type = other DNA
cagctgccccaacctctctt

SEQ ID NO: 275392 - DNA, 20 bp, synthetic construct
  source 1..20: mol_type = other DNA
gcagctgccccaacctctct

SEQ ID NO: 275393 - DNA, 20 bp, synthetic construct
  source 1..20: mol_type = other DNA
tgcagctgccccaacctctc

SEQ ID NO: 275394 - DNA, 20 bp, synthetic construct
  source 1..20: mol_type = other DNA
ttgcagctgccccaacctct

SEQ ID NO: 275395 - DNA, 20 bp, synthetic construct
  source 1..20: mol_type = other DNA
cttgcagctgccccaacctc

SEQ ID NO: 275396 - DNA, 20 bp, synthetic construct
  source 1..20: mol_type = other DNA
gcttgcagctgccccaacct

SEQ ID NO: 275397 - DNA, 20 bp, synthetic construct
  source 1..20: mol_type = other DNA
ggcttgcagctgccccaacc

SEQ ID NO: 275398 - DNA, 20 bp, synthetic construct
  source 1..20: mol_type = other DNA
aggcttgcagctgccccaac

SEQ ID NO: 275399 - DNA, 20 bp, synthetic construct
  source 1..20: mol_type = other DNA
gaggcttgcagctgccccaa

SEQ ID NO: 275400 - DNA, 20 bp, synthetic construct
  source 1..20: mol_type = other DNA
agaggcttgcagctgcccca

SEQ ID NO: 275401 - DNA, 20 bp, synthetic construct
  source 1..20: mol_type = other DNA
cagaggcttgcagctgcccc

SEQ ID NO: 275402 - DNA, 20 bp, synthetic construct
  source 1..20: mol_type = other DNA
ccagaggcttgcagctgccc

SEQ ID NO: 275403 - DNA, 20 bp, synthetic construct
  source 1..20: mol_type = other DNA
tccagaggcttgcagctgcc

SEQ ID NO: 275404 - DNA, 20 bp, synthetic construct
  source 1..20: mol_type = other DNA
gtccagaggcttgcagctgc

SEQ ID NO: 275405 - DNA, 20 bp, synthetic construct
  source 1..20: mol_type = other DNA
tgtccagaggcttgcagctg

SEQ ID NO: 275406 - DNA, 20 bp, synthetic construct
  source 1..20: mol_type = other DNA
atgtccagaggcttgcagct

SEQ ID NO: 275407 - DNA, 20 bp, synthetic construct
  source 1..20: mol_type = other DNA
gatgtccagaggcttgcagc

SEQ ID NO: 275408 - DNA, 20 bp, synthetic construct
  source 1..20: mol_type = other DNA
cgatgtccagaggcttgcag

SEQ ID NO: 275409 - DNA, 20 bp, synthetic construct
  source 1..20: mol_type = other DNA
gcgatgtccagaggcttgca

SEQ ID NO: 275410 - DNA, 20 bp, synthetic construct
  source 1..20: mol_type = other DNA
ggcgatgtccagaggcttgc

SEQ ID NO: 275411 - DNA, 20 bp, synthetic construct
  source 1..20: mol_type = other DNA
gggcgatgtccagaggcttg

SEQ ID NO: 275412 - DNA, 20 bp, synthetic construct
  source 1..20: mol_type = other DNA
cgggcgatgtccagaggctt

SEQ ID NO: 275413 - DNA, 20 bp, synthetic construct
  source 1..20: mol_type = other DNA
tcgggcgatgtccagaggct

SEQ ID NO: 275414 - DNA, 20 bp, synthetic construct
  source 1..20: mol_type = other DNA
gtcgggcgatgtccagaggc

SEQ ID NO: 275415 - DNA, 20 bp, synthetic construct
  source 1..20: mol_type = other DNA
tgtcgggcgatgtccagagg

SEQ ID NO: 275416 - DNA, 20 bp, synthetic construct
  source 1..20: mol_type = other DNA
ctgtcgggcgatgtccagag

SEQ ID NO: 275417 - DNA, 20 bp, synthetic construct
  source 1..20: mol_type = other DNA
cctgtcgggcgatgtccaga

SEQ ID NO: 275418 - DNA, 20 bp, synthetic construct
  source 1..20: mol_type = other DNA
tcctgtcgggcgatgtccag

SEQ ID NO: 275419 - DNA, 20 bp, synthetic construct
  source 1..20: mol_type = other DNA
gtcctgtcgggcgatgtcca

SEQ ID NO: 275420 - DNA, 20 bp, synthetic construct
  source 1..20: mol_type = other DNA
tgtcctgtcgggcgatgtcc

SEQ ID NO: 275421 - DNA, 20 bp, synthetic construct
  source 1..20: mol_type = other DNA
ctgtcctgtcgggcgatgtc

SEQ ID NO: 275422 - DNA, 20 bp, synthetic construct
  source 1..20: mol_type = other DNA
tctgtcctgtcgggcgatgt

SEQ ID NO: 275423 - DNA, 20 bp, synthetic construct
  source 1..20: mol_type = other DNA
ctctgtcctgtcgggcgatg

SEQ ID NO: 275424 - DNA, 20 bp, synthetic construct
  source 1..20: mol_type = other DNA
cctctgtcctgtcgggcgat

SEQ ID NO: 275425 - DNA, 20 bp, synthetic construct
  source 1..20: mol_type = other DNA
ccctctgtcctgtcgggcga

SEQ ID NO: 275426 - DNA, 20 bp, synthetic construct
  source 1..20: mol_type = other DNA
accctctgtcctgtcgggcg

SEQ ID NO: 275427 - DNA, 20 bp, synthetic construct
  source 1..20: mol_type = other DNA
caccctctgtcctgtcgggc

SEQ ID NO: 275428 - DNA, 20 bp, synthetic construct
  source 1..20: mol_type = other DNA
ccaccctctgtcctgtcggg

SEQ ID NO: 275429 - DNA, 20 bp, synthetic construct
  source 1..20: mol_type = other DNA
accaccctctgtcctgtcgg

SEQ ID NO: 275430 - DNA, 20 bp, synthetic construct
  source 1..20: mol_type = other DNA
caccaccctctgtcctgtcg

SEQ ID NO: 275431 - DNA, 20 bp, synthetic construct
  source 1..20: mol_type = other DNA
ccaccaccctctgtcctgtc

SEQ ID NO: 275432 - DNA, 20 bp, synthetic construct
  source 1..20: mol_type = other DNA
tccaccaccctctgtcctgt

SEQ ID NO: 275433 - DNA, 20 bp, synthetic construct
  source 1..20: mol_type = other DNA
gtccaccaccctctgtcctg

SEQ ID NO: 275434 - DNA, 20 bp, synthetic construct
  source 1..20: mol_type = other DNA
cgtccaccaccctctgtcct

SEQ ID NO: 275435 - DNA, 20 bp, synthetic construct
  source 1..20: mol_type = other DNA
ccgtccaccaccctctgtcc

SEQ ID NO: 275436 - DNA, 20 bp, synthetic construct
  source 1..20: mol_type = other DNA
accgtccaccaccctctgtc

SEQ ID NO: 275437 - DNA, 20 bp, synthetic construct
  source 1..20: mol_type = other DNA
caccgtccaccaccctctgt

SEQ ID NO: 275438 - DNA, 20 bp, synthetic construct
  source 1..20: mol_type = other DNA
ccaccgtccaccaccctctg

SEQ ID NO: 275439 - DNA, 20 bp, synthetic construct
  source 1..20: mol_type = other DNA
gccaccgtccaccaccctct

SEQ ID NO: 275440 - DNA, 20 bp, synthetic construct
  source 1..20: mol_type = other DNA
ggccaccgtccaccaccctc

SEQ ID NO: 275441 - DNA, 20 bp, synthetic construct
  source 1..20: mol_type = other DNA
gggccaccgtccaccaccct

SEQ ID NO: 275442 - DNA, 20 bp, synthetic construct
  source 1..20: mol_type = other DNA
agggccaccgtccaccaccc

SEQ ID NO: 275443 - DNA, 20 bp, synthetic construct
  source 1..20: mol_type = other DNA
cagggccaccgtccaccacc

SEQ ID NO: 275444 - DNA, 20 bp, synthetic construct
  source 1..20: mol_type = other DNA
tcagggccaccgtccaccac

SEQ ID NO: 275445 - DNA, 20 bp, synthetic construct
  source 1..20: mol_type = other DNA
ttcagggccaccgtccacca

SEQ ID NO: 275446 - DNA, 20 bp, synthetic construct
  source 1..20: mol_type = other DNA
cttcagggccaccgtccacc

SEQ ID NO: 275447 - DNA, 20 bp, synthetic construct
  source 1..20: mol_type = other DNA
tcttcagggccaccgtccac

SEQ ID NO: 275448 - DNA, 20 bp, synthetic construct
  source 1..20: mol_type = other DNA
ctcttcagggccaccgtcca

SEQ ID NO: 275449 - DNA, 20 bp, synthetic construct
  source 1..20: mol_type = other DNA
tctcttcagggccaccgtcc

SEQ ID NO: 275450 - DNA, 20 bp, synthetic construct
  source 1..20: mol_type = other DNA
ctctcttcagggccaccgtc

SEQ ID NO: 275451 - DNA, 20 bp, synthetic construct
  source 1..20: mol_type = other DNA
cctctcttcagggccaccgt

SEQ ID NO: 275452 - DNA, 20 bp, synthetic construct
  source 1..20: mol_type = other DNA
gcctctcttcagggccaccg

SEQ ID NO: 275453 - DNA, 20 bp, synthetic construct
  source 1..20: mol_type = other DNA
agcctctcttcagggccacc

SEQ ID NO: 275454 - DNA, 20 bp, synthetic construct
  source 1..20: mol_type = other DNA
gagcctctcttcagggccac

SEQ ID NO: 275455 - DNA, 20 bp, synthetic construct
  source 1..20: mol_type = other DNA
tgagcctctcttcagggcca

SEQ ID NO: 275456 - DNA, 20 bp, synthetic construct
  source 1..20: mol_type = other DNA
ctgagcctctcttcagggcc

SEQ ID NO: 275457 - DNA, 20 bp, synthetic construct
  source 1..20: mol_type = other DNA
actgagcctctcttcagggc

SEQ ID NO: 275458 - DNA, 20 bp, synthetic construct
  source 1..20: mol_type = other DNA
aactgagcctctcttcaggg

SEQ ID NO: 275459 - DNA, 20 bp, synthetic construct
  source 1..20: mol_type = other DNA
gaactgagcctctcttcagg

SEQ ID NO: 275460 - DNA, 20 bp, synthetic construct
  source 1..20: mol_type = other DNA
tgaactgagcctctcttcag

SEQ ID NO: 275461 - DNA, 20 bp, synthetic construct
  source 1..20: mol_type = other DNA
ctgaactgagcctctcttca

SEQ ID NO: 275462 - DNA, 20 bp, synthetic construct
  source 1..20: mol_type = other DNA
gctgaactgagcctctcttc

SEQ ID NO: 275463 - DNA, 20 bp, synthetic construct
  source 1..20: mol_type = other DNA
agctgaactgagcctctctt

SEQ ID NO: 275464 - DNA, 20 bp, synthetic construct
  source 1..20: mol_type = other DNA
cagctgaactgagcctctct

SEQ ID NO: 275465 - DNA, 20 bp, synthetic construct
  source 1..20: mol_type = other DNA
ccagctgaactgagcctctc

SEQ ID NO: 275466 - DNA, 20 bp, synthetic construct
  source 1..20: mol_type = other DNA
gccagctgaactgagcctct

SEQ ID NO: 275467 - DNA, 20 bp, synthetic construct
  source 1..20: mol_type = other DNA
tgccagctgaactgagcctc

SEQ ID NO: 275468 - DNA, 20 bp, synthetic construct
  source 1..20: mol_type = other DNA
ctgccagctgaactgagcct

SEQ ID NO: 275469 - DNA, 20 bp, synthetic construct
  source 1..20: mol_type = other DNA
actgccagctgaactgagcc

SEQ ID NO: 275470 - DNA, 20 bp, synthetic construct
  source 1..20: mol_type = other DNA
cactgccagctgaactgagc

SEQ ID NO: 275471 - DNA, 20 bp, synthetic construct
  source 1..20: mol_type = other DNA
ccactgccagctgaactgag

SEQ ID NO: 275472 - DNA, 20 bp, synthetic construct
  source 1..20: mol_type = other DNA
gccactgccagctgaactga

SEQ ID NO: 275473 - DNA, 20 bp, synthetic construct
  source 1..20: mol_type = other DNA
ggccactgccagctgaactg

SEQ ID NO: 275474 - DNA, 20 bp, synthetic construct
  source 1..20: mol_type = other DNA
cggccactgccagctgaact

SEQ ID NO: 275475 - DNA, 20 bp, synthetic construct
  source 1..20: mol_type = other DNA
acggccactgccagctgaac

SEQ ID NO: 275476 - DNA, 20 bp, synthetic construct
  source 1..20: mol_type = other DNA
cacggccactgccagctgaa

SEQ ID NO: 275477 - DNA, 20 bp, synthetic construct
  source 1..20: mol_type = other DNA
ccacggccactgccagctga

SEQ ID NO: 275478 - DNA, 20 bp, synthetic construct
  source 1..20: mol_type = other DNA
cccacggccactgccagctg

SEQ ID NO: 275479 - DNA, 20 bp, synthetic construct
  source 1..20: mol_type = other DNA
tcccacggccactgccagct

SEQ ID NO: 275480 - DNA, 20 bp, synthetic construct
  source 1..20: mol_type = other DNA
ctcccacggccactgccagc

SEQ ID NO: 275481 - DNA, 20 bp, synthetic construct
  source 1..20: mol_type = other DNA
actcccacggccactgccag

SEQ ID NO: 275482 - DNA, 20 bp, synthetic construct
  source 1..20: mol_type = other DNA
cactcccacggccactgcca

SEQ ID NO: 275483 - DNA, 20 bp, synthetic construct
  source 1..20: mol_type = other DNA
gcactcccacggccactgcc

SEQ ID NO: 275484 - DNA, 20 bp, synthetic construct
  source 1..20: mol_type = other DNA
agcactcccacggccactgc

SEQ ID NO: 275485 - DNA, 20 bp, synthetic construct
  source 1..20: mol_type = other DNA
cagcactcccacggccactg

SEQ ID NO: 275486 - DNA, 20 bp, synthetic construct
  source 1..20: mol_type = other DNA
tcagcactcccacggccact

SEQ ID NO: 275487 - DNA, 20 bp, synthetic construct
  source 1..20: mol_type = other DNA
ttcagcactcccacggccac

SEQ ID NO: 275488 - DNA, 20 bp, synthetic construct
  source 1..20: mol_type = other DNA
cttcagcactcccacggcca

SEQ ID NO: 275489 - DNA, 20 bp, synthetic construct
  source 1..20: mol_type = other DNA
gcttcagcactcccacggcc

SEQ ID NO: 275490 - DNA, 20 bp, synthetic construct
  source 1..20: mol_type = other DNA
tgcttcagcactcccacggc

SEQ ID NO: 275491 - DNA, 20 bp, synthetic construct
  source 1..20: mol_type = other DNA
ctgcttcagcactcccacgg

SEQ ID NO: 275492 - DNA, 20 bp, synthetic construct
  source 1..20: mol_type = other DNA
cctgcttcagcactcccacg

SEQ ID NO: 275493 - DNA, 20 bp, synthetic construct
  source 1..20: mol_type = other DNA
gcctgcttcagcactcccac

SEQ ID NO: 275494 - DNA, 20 bp, synthetic construct
  source 1..20: mol_type = other DNA
tgcctgcttcagcactccca

SEQ ID NO: 275495 - DNA, 20 bp, synthetic construct
  source 1..20: mol_type = other DNA
ctgcctgcttcagcactccc

SEQ ID NO: 275496 - DNA, 20 bp, synthetic construct
  source 1..20: mol_type = other DNA
cctgcctgcttcagcactcc

SEQ ID NO: 275497 - DNA, 20 bp, synthetic construct
  source 1..20: mol_type = other DNA
gcctgcctgcttcagcactc

SEQ ID NO: 275498 - DNA, 20 bp, synthetic construct
  source 1..20: mol_type = other DNA
agcctgcctgcttcagcact

SEQ ID NO: 275499 - DNA, 20 bp, synthetic construct
  source 1..20: mol_type = other DNA
cagcctgcctgcttcagcac

SEQ ID NO: 275500 - DNA, 20 bp, synthetic construct
  source 1..20: mol_type = other DNA
acagcctgcctgcttcagca

SEQ ID NO: 275501 - DNA, 20 bp, synthetic construct
  source 1..20: mol_type = other DNA
gacagcctgcctgcttcagc

SEQ ID NO: 275502 - DNA, 20 bp, synthetic construct
  source 1..20: mol_type = other DNA
cgacagcctgcctgcttcag

SEQ ID NO: 275503 - DNA, 20 bp, synthetic construct
  source 1..20: mol_type = other DNA
ccgacagcctgcctgcttca

SEQ ID NO: 275504 - DNA, 20 bp, synthetic construct
  source 1..20: mol_type = other DNA
gccgacagcctgcctgcttc

SEQ ID NO: 275505 - DNA, 20 bp, synthetic construct
  source 1..20: mol_type = other DNA
tgccgacagcctgcctgctt

SEQ ID NO: 275506 - DNA, 20 bp, synthetic construct
  source 1..20: mol_type = other DNA
atgccgacagcctgcctgct

SEQ ID NO: 275507 - DNA, 20 bp, synthetic construct
  source 1..20: mol_type = other DNA
gatgccgacagcctgcctgc

SEQ ID NO: 275508 - DNA, 20 bp, synthetic construct
  source 1..20: mol_type = other DNA
agatgccgacagcctgcctg

SEQ ID NO: 275509 - DNA, 20 bp, synthetic construct
  source 1..20: mol_type = other DNA
cagatgccgacagcctgcct

SEQ ID NO: 275510 - DNA, 20 bp, synthetic construct
  source 1..20: mol_type = other DNA
gcagatgccgacagcctgcc

SEQ ID NO: 275511 - DNA, 20 bp, synthetic construct
  source 1..20: mol_type = other DNA
agcagatgccgacagcctgc

SEQ ID NO: 275512 - DNA, 20 bp, synthetic construct
  source 1..20: mol_type = other DNA
cagcagatgccgacagcctg

SEQ ID NO: 275513 - DNA, 20 bp, synthetic construct
  source 1..20: mol_type = other DNA
ccagcagatgccgacagcct

SEQ ID NO: 275514 - DNA, 20 bp, synthetic construct
  source 1..20: mol_type = other DNA
cccagcagatgccgacagcc

SEQ ID NO: 275515 - DNA, 20 bp, synthetic construct
  source 1..20: mol_type = other DNA
ccccagcagatgccgacagc

SEQ ID NO: 275516 - DNA, 20 bp, synthetic construct
  source 1..20: mol_type = other DNA
tccccagcagatgccgacag

SEQ ID NO: 275517 - DNA, 20 bp, synthetic construct
  source 1..20: mol_type = other DNA
gtccccagcagatgccgaca

SEQ ID NO: 275518 - DNA, 20 bp, synthetic construct
  source 1..20: mol_type = other DNA
cgtccccagcagatgccgac

SEQ ID NO: 275519 - DNA, 20 bp, synthetic construct
  source 1..20: mol_type = other DNA
ccgtccccagcagatgccga

SEQ ID NO: 275520 - DNA, 20 bp, synthetic construct
  source 1..20: mol_type = other DNA
accgtccccagcagatgccg

SEQ ID NO: 275521 - DNA, 20 bp, synthetic construct
  source 1..20: mol_type = other DNA
aaccgtccccagcagatgcc

SEQ ID NO: 275522 - DNA, 20 bp, synthetic construct
  source 1..20: mol_type = other DNA
taaccgtccccagcagatgc

SEQ ID NO: 275523 - DNA, 20 bp, synthetic construct
  source 1..20: mol_type = other DNA
ttaaccgtccccagcagatg

SEQ ID NO: 275524 - DNA, 20 bp, synthetic construct
  source 1..20: mol_type = other DNA
cttaaccgtccccagcagat

SEQ ID NO: 275525 - DNA, 20 bp, synthetic construct
  source 1..20: mol_type = other DNA
gcttaaccgtccccagcaga

SEQ ID NO: 275526 - DNA, 20 bp, synthetic construct
  source 1..20: mol_type = other DNA
tgcttaaccgtccccagcag

SEQ ID NO: 275527 - DNA, 20 bp, synthetic construct
  source 1..20: mol_type = other DNA
ctgcttaaccgtccccagca

SEQ ID NO: 275528 - DNA, 20 bp, synthetic construct
  source 1..20: mol_type = other DNA
cctgcttaaccgtccccagc

SEQ ID NO: 275529 - DNA, 20 bp, synthetic construct
  source 1..20: mol_type = other DNA
ccctgcttaaccgtccccag

SEQ ID NO: 275530 - DNA, 20 bp, synthetic construct
  source 1..20: mol_type = other DNA
cccctgcttaaccgtcccca

SEQ ID NO: 275531 - DNA, 20 bp, synthetic construct
  source 1..20: mol_type = other DNA
acccctgcttaaccgtcccc

SEQ ID NO: 275532 - DNA, 20 bp, synthetic construct
  source 1..20: mol_type = other DNA
cacccctgcttaaccgtccc

SEQ ID NO: 275533 - DNA, 20 bp, synthetic construct
  source 1..20: mol_type = other DNA
tcacccctgcttaaccgtcc

SEQ ID NO: 275534 - DNA, 20 bp, synthetic construct
  source 1..20: mol_type = other DNA
ctcacccctgcttaaccgtc

SEQ ID NO: 275535 - DNA, 20 bp, synthetic construct
  source 1..20: mol_type = other DNA
cctcacccctgcttaaccgt

SEQ ID NO: 275536 - DNA, 20 bp, synthetic construct
  source 1..20: mol_type = other DNA
ccctcacccctgcttaaccg

SEQ ID NO: 275537 - DNA, 20 bp, synthetic construct
  source 1..20: mol_type = other DNA
gccctcacccctgcttaacc

SEQ ID NO: 275538 - DNA, 20 bp, synthetic construct
  source 1..20: mol_type = other DNA
ggccctcacccctgcttaac

SEQ ID NO: 275539 - DNA, 20 bp, synthetic construct
  source 1..20: mol_type = other DNA
gggccctcacccctgcttaa

SEQ ID NO: 275540 - DNA, 20 bp, synthetic construct
  source 1..20: mol_type = other DNA
tgggccctcacccctgctta

SEQ ID NO: 275541 - DNA, 20 bp, synthetic construct
  source 1..20: mol_type = other DNA
ctgggccctcacccctgctt

SEQ ID NO: 275542 - DNA, 20 bp, synthetic construct
  source 1..20: mol_type = other DNA
gctgggccctcacccctgct

SEQ ID NO: 275543 - DNA, 20 bp, synthetic construct
  source 1..20: mol_type = other DNA
ggctgggccctcacccctgc

SEQ ID NO: 275544 - DNA, 20 bp, synthetic construct
  source 1..20: mol_type = other DNA
aggctgggccctcacccctg

SEQ ID NO: 275545 - DNA, 20 bp, synthetic construct
  source 1..20: mol_type = other DNA
gaggctgggccctcacccct

SEQ ID NO: 275546 - DNA, 20 bp, synthetic construct
  source 1..20: mol_type = other DNA
tgaggctgggccctcacccc

SEQ ID NO: 275547 - DNA, 20 bp, synthetic construct
  source 1..20: mol_type = other DNA
ctgaggctgggccctcaccc

SEQ ID NO: 275548 - DNA, 20 bp, synthetic construct
  source 1..20: mol_type = other DNA
gctgaggctgggccctcacc

SEQ ID NO: 275549 - DNA, 20 bp, synthetic construct
  source 1..20: mol_type = other DNA
tgctgaggctgggccctcac

SEQ ID NO: 275550 - DNA, 20 bp, synthetic construct
  source 1..20: mol_type = other DNA
ctgctgaggctgggccctca

SEQ ID NO: 275551 - DNA, 20 bp, synthetic construct
  source 1..20: mol_type = other DNA
gctgctgaggctgggccctc

SEQ ID NO: 275552 - DNA, 20 bp, synthetic construct
  source 1..20: mol_type = other DNA
ggctgctgaggctgggccct

SEQ ID NO: 275553 - DNA, 20 bp, synthetic construct
  source 1..20: mol_type = other DNA
gggctgctgaggctgggccc

SEQ ID NO: 275554 - DNA, 20 bp, synthetic construct
  source 1..20: mol_type = other DNA
agggctgctgaggctgggcc

SEQ ID NO: 275555 - DNA, 20 bp, synthetic construct
  source 1..20: mol_type = other DNA
aagggctgctgaggctgggc

SEQ ID NO: 275556 - DNA, 20 bp, synthetic construct
  source 1..20: mol_type = other DNA
gaagggctgctgaggctggg

SEQ ID NO: 275557 - DNA, 20 bp, synthetic construct
  source 1..20: mol_type = other DNA
agaagggctgctgaggctgg

SEQ ID NO: 275558 - DNA, 20 bp, synthetic construct
  source 1..20: mol_type = other DNA
aagaagggctgctgaggctg

SEQ ID NO: 275559 - DNA, 20 bp, synthetic construct
  source 1..20: mol_type = other DNA
caagaagggctgctgaggct

SEQ ID NO: 275560 - DNA, 20 bp, synthetic construct
  source 1..20: mol_type = other DNA
ccaagaagggctgctgaggc

SEQ ID NO: 275561 - DNA, 20 bp, synthetic construct
  source 1..20: mol_type = other DNA
cccaagaagggctgctgagg

SEQ ID NO: 275562 - DNA, 20 bp, synthetic construct
  source 1..20: mol_type = other DNA
ccccaagaagggctgctgag

SEQ ID NO: 275563 - DNA, 20 bp, synthetic construct
  source 1..20: mol_type = other DNA
cccccaagaagggctgctga

SEQ ID NO: 275564 - DNA, 20 bp, synthetic construct
  source 1..20: mol_type = other DNA
ccccccaagaagggctgctg

SEQ ID NO: 275565 - DNA, 20 bp, synthetic construct
  source 1..20: mol_type = other DNA
accccccaagaagggctgct

SEQ ID NO: 275566 - DNA, 20 bp, synthetic construct
  source 1..20: mol_type = other DNA
gaccccccaagaagggctgc

SEQ ID NO: 275567 - DNA, 20 bp, synthetic construct
  source 1..20: mol_type = other DNA
cgaccccccaagaagggctg

SEQ ID NO: 275568 - DNA, 20 bp, synthetic construct
  source 1..20: mol_type = other DNA
gcgaccccccaagaagggct

SEQ ID NO: 275569 - DNA, 20 bp, synthetic construct
  source 1..20: mol_type = other DNA
agcgaccccccaagaagggc

SEQ ID NO: 275570 - DNA, 20 bp, synthetic construct
  source 1..20: mol_type = other DNA
cagcgaccccccaagaaggg

SEQ ID NO: 275571 - DNA, 20 bp, synthetic construct
  source 1..20: mol_type = other DNA
ccagcgaccccccaagaagg

SEQ ID NO: 275572 - DNA, 20 bp, synthetic construct
  source 1..20: mol_type = other DNA
cccagcgaccccccaagaag

SEQ ID NO: 275573 - DNA, 20 bp, synthetic construct
  source 1..20: mol_type = other DNA
tcccagcgaccccccaagaa

SEQ ID NO: 275574 - DNA, 20 bp, synthetic construct
  source 1..20: mol_type = other DNA
ttcccagcgaccccccaaga

SEQ ID NO: 275575 - DNA, 20 bp, synthetic construct
  source 1..20: mol_type = other DNA
tttcccagcgaccccccaag

SEQ ID NO: 275576 - DNA, 20 bp, synthetic construct
  source 1..20: mol_type = other DNA
gtttcccagcgaccccccaa

SEQ ID NO: 275577 - DNA, 20 bp, synthetic construct
  source 1..20: mol_type = other DNA
tgtttcccagcgacccccca

SEQ ID NO: 275578 - DNA, 20 bp, synthetic construct
  source 1..20: mol_type = other DNA
atgtttcccagcgacccccc

SEQ ID NO: 275579 - DNA, 20 bp, synthetic construct
  source 1..20: mol_type = other DNA
tatgtttcccagcgaccccc

SEQ ID NO: 275580 - DNA, 20 bp, synthetic construct
  source 1..20: mol_type = other DNA
ctatgtttcccagcgacccc

SEQ ID NO: 275581 - DNA, 20 bp, synthetic construct
  source 1..20: mol_type = other DNA
tctatgtttcccagcgaccc

SEQ ID NO: 275582 - DNA, 20 bp, synthetic construct
  source 1..20: mol_type = other DNA
ctctatgtttcccagcgacc

SEQ ID NO: 275583 - DNA, 20 bp, synthetic construct
  source 1..20: mol_type = other DNA
cctctatgtttcccagcgac

SEQ ID NO: 275584 - DNA, 20 bp, synthetic construct
  source 1..20: mol_type = other DNA
tcctctatgtttcccagcga

SEQ ID NO: 275585 - DNA, 20 bp, synthetic construct
  source 1..20: mol_type = other DNA
ctcctctatgtttcccagcg

SEQ ID NO: 275586 - DNA, 20 bp, synthetic construct
  source 1..20: mol_type = other DNA
tctcctctatgtttcccagc

SEQ ID NO: 275587 - DNA, 20 bp, synthetic construct
  source 1..20: mol_type = other DNA
ttctcctctatgtttcccag

SEQ ID NO: 275588 - DNA, 20 bp, synthetic construct
  source 1..20: mol_type = other DNA
gttctcctctatgtttccca

SEQ ID NO: 275589 - DNA, 20 bp, synthetic construct
  source 1..20: mol_type = other DNA
agttctcctctatgtttccc

SEQ ID NO: 275590 - DNA, 20 bp, synthetic construct
  source 1..20: mol_type = other DNA
cagttctcctctatgtttcc

SEQ ID NO: 275591 - DNA, 20 bp, synthetic construct
  source 1..20: mol_type = other DNA
tcagttctcctctatgtttc

SEQ ID NO: 275592 - DNA, 20 bp, synthetic construct
  source 1..20: mol_type = other DNA
ttcagttctcctctatgttt

SEQ ID NO: 275593 - DNA, 20 bp, synthetic construct
  source 1..20: mol_type = other DNA
cttcagttctcctctatgtt

SEQ ID NO: 275594 - DNA, 20 bp, synthetic construct
  source 1..20: mol_type = other DNA
tcttcagttctcctctatgt

SEQ ID NO: 275595 - DNA, 20 bp, synthetic construct
  source 1..20: mol_type = other DNA
ttcttcagttctcctctatg

SEQ ID NO: 275596 - DNA, 20 bp, synthetic construct
  source 1..20: mol_type = other DNA
cttcttcagttctcctctat

SEQ ID NO: 275597 - DNA, 20 bp, synthetic construct
  source 1..20: mol_type = other DNA
gcttcttcagttctcctcta

SEQ ID NO: 275598 - DNA, 20 bp, synthetic construct
  source 1..20: mol_type = other DNA
tgcttcttcagttctcctct

SEQ ID NO: 275599 - DNA, 20 bp, synthetic construct
  source 1..20: mol_type = other DNA
ctgcttcttcagttctcctc

SEQ ID NO: 275600 - DNA, 20 bp, synthetic construct
  source 1..20: mol_type = other DNA
cctgcttcttcagttctcct

SEQ ID NO: 275601 - DNA, 20 bp, synthetic construct
  source 1..20: mol_type = other DNA
ccctgcttcttcagttctcc

SEQ ID NO: 275602 - DNA, 20 bp, synthetic construct
  source 1..20: mol_type = other DNA
tccctgcttcttcagttctc

SEQ ID NO: 275603 - DNA, 20 bp, synthetic construct
  source 1..20: mol_type = other DNA
ctccctgcttcttcagttct

SEQ ID NO: 275604 - DNA, 20 bp, synthetic construct
  source 1..20: mol_type = other DNA
actccctgcttcttcagttc

SEQ ID NO: 275605 - DNA, 20 bp, synthetic construct
  source 1..20: mol_type = other DNA
gactccctgcttcttcagtt

SEQ ID NO: 275606 - DNA, 20 bp, synthetic construct
  source 1..20: mol_type = other DNA
ggactccctgcttcttcagt

SEQ ID NO: 275607 - DNA, 20 bp, synthetic construct
  source 1..20: mol_type = other DNA
gggactccctgcttcttcag

SEQ ID NO: 275608 - DNA, 20 bp, synthetic construct
  source 1..20: mol_type = other DNA
tgggactccctgcttcttca

SEQ ID NO: 275609 - DNA, 20 bp, synthetic construct
  source 1..20: mol_type = other DNA
ctgggactccctgcttcttc

SEQ ID NO: 275610 - DNA, 20 bp, synthetic construct
  source 1..20: mol_type = other DNA
cctgggactccctgcttctt

SEQ ID NO: 275611 - DNA, 20 bp, synthetic construct
  source 1..20: mol_type = other DNA
ccctgggactccctgcttct

SEQ ID NO: 275612 - DNA, 20 bp, synthetic construct
  source 1..20: mol_type = other DNA
accctgggactccctgcttc

SEQ ID NO: 275613 - DNA, 20 bp, synthetic construct
  source 1..20: mol_type = other DNA
gaccctgggactccctgctt

SEQ ID NO: 275614 - DNA, 20 bp, synthetic construct
  source 1..20: mol_type = other DNA
ggaccctgggactccctgct

SEQ ID NO: 275615 - DNA, 20 bp, synthetic construct
  source 1..20: mol_type = other DNA
tggaccctgggactccctgc

SEQ ID NO: 275616 - DNA, 20 bp, synthetic construct
  source 1..20: mol_type = other DNA
atggaccctgggactccctg

SEQ ID NO: 275617 - DNA, 20 bp, synthetic construct
  source 1..20: mol_type = other DNA
catggaccctgggactccct

SEQ ID NO: 275618 - DNA, 20 bp, synthetic construct
  source 1..20: mol_type = other DNA
gcatggaccctgggactccc

SEQ ID NO: 275619 - DNA, 20 bp, synthetic construct
  source 1..20: mol_type = other DNA
tgcatggaccctgggactcc

SEQ ID NO: 275620 - DNA, 20 bp, synthetic construct
  source 1..20: mol_type = other DNA
ctgcatggaccctgggactc

SEQ ID NO: 275621 - DNA, 20 bp, synthetic construct
  source 1..20: mol_type = other DNA
cctgcatggaccctgggact

SEQ ID NO: 275622 - DNA, 20 bp, synthetic construct
  source 1..20: mol_type = other DNA
ccctgcatggaccctgggac

SEQ ID NO: 275623 - DNA, 20 bp, synthetic construct
  source 1..20: mol_type = other DNA
gccctgcatggaccctggga

SEQ ID NO: 275624 - DNA, 20 bp, synthetic construct
  source 1..20: mol_type = other DNA
cgccctgcatggaccctggg

SEQ ID NO: 275625 - DNA, 20 bp, synthetic construct
  source 1..20: mol_type = other DNA
tcgccctgcatggaccctgg

SEQ ID NO: 275626 - DNA, 20 bp, synthetic construct
  source 1..20: mol_type = other DNA
ctcgccctgcatggaccctg

SEQ ID NO: 275627 - DNA, 20 bp, synthetic construct
  source 1..20: mol_type = other DNA
tctcgccctgcatggaccct

SEQ ID NO: 275628 - DNA, 20 bp, synthetic construct
  source 1..20: mol_type = other DNA
ctctcgccctgcatggaccc

SEQ ID NO: 275629 - DNA, 20 bp, synthetic construct
  source 1..20: mol_type = other DNA
tctctcgccctgcatggacc

SEQ ID NO: 275630 - DNA, 20 bp, synthetic construct
  source 1..20: mol_type = other DNA
ctctctcgccctgcatggac

SEQ ID NO: 275631 - DNA, 20 bp, synthetic construct
  source 1..20: mol_type = other DNA
tctctctcgccctgcatgga

SEQ ID NO: 275632 - DNA, 20 bp, synthetic construct
  source 1..20: mol_type = other DNA
ttctctctcgccctgcatgg

SEQ ID NO: 275633 - DNA, 20 bp, synthetic construct
  source 1..20: mol_type = other DNA
cttctctctcgccctgcatg

SEQ ID NO: 275634 - DNA, 20 bp, synthetic construct
  source 1..20: mol_type = other DNA
acttctctctcgccctgcat

SEQ ID NO: 275635 - DNA, 20 bp, synthetic construct
  source 1..20: mol_type = other DNA
aacttctctctcgccctgca

SEQ ID NO: 275636 - DNA, 20 bp, synthetic construct
  source 1..20: mol_type = other DNA
caacttctctctcgccctgc

SEQ ID NO: 275637 - DNA, 20 bp, synthetic construct
  source 1..20: mol_type = other DNA
gcaacttctctctcgccctg

SEQ ID NO: 275638 - DNA, 20 bp, synthetic construct
  source 1..20: mol_type = other DNA
agcaacttctctctcgccct

SEQ ID NO: 275639 - DNA, 20 bp, synthetic construct
  source 1..20: mol_type = other DNA
gagcaacttctctctcgccc

SEQ ID NO: 275640 - DNA, 20 bp, synthetic construct
  source 1..20: mol_type = other DNA
tgagcaacttctctctcgcc

SEQ ID NO: 275641 - DNA, 20 bp, synthetic construct
  source 1..20: mol_type = other DNA
atgagcaacttctctctcgc

SEQ ID NO: 275642 - DNA, 20 bp, synthetic construct
  source 1..20: mol_type = other DNA
catgagcaacttctctctcg

SEQ ID NO: 275643 - DNA, 20 bp, synthetic construct
  source 1..20: mol_type = other DNA
acatgagcaacttctctctc

SEQ ID NO: 275644 - DNA, 20 bp, synthetic construct
  source 1..20: mol_type = other DNA
cacatgagcaacttctctct

SEQ ID NO: 275645 - DNA, 20 bp, synthetic construct
  source 1..20: mol_type = other DNA
ccacatgagcaacttctctc

SEQ ID NO: 275646 - DNA, 20 bp, synthetic construct
  source 1..20: mol_type = other DNA
cccacatgagcaacttctct

SEQ ID NO: 275647 - DNA, 20 bp, synthetic construct
  source 1..20: mol_type = other DNA
ccccacatgagcaacttctc

SEQ ID NO: 275648 - DNA, 20 bp, synthetic construct
  source 1..20: mol_type = other DNA
gccccacatgagcaacttct

SEQ ID NO: 275649 - DNA, 20 bp, synthetic construct
  source 1..20: mol_type = other DNA
ggccccacatgagcaacttc

SEQ ID NO: 275650 - DNA, 20 bp, synthetic construct
  source 1..20: mol_type = other DNA
gggccccacatgagcaactt

SEQ ID NO: 275651 - DNA, 20 bp, synthetic construct
  source 1..20: mol_type = other DNA
tgggccccacatgagcaact

SEQ ID NO: 275652 - DNA, 20 bp, synthetic construct
  source 1..20: mol_type = other DNA
ctgggccccacatgagcaac

SEQ ID NO: 275653 - DNA, 20 bp, synthetic construct
  source 1..20: mol_type = other DNA
cctgggccccacatgagcaa

SEQ ID NO: 275654 - DNA, 20 bp, synthetic construct
  source 1..20: mol_type = other DNA
gcctgggccccacatgagca

SEQ ID NO: 275655 - DNA, 20 bp, synthetic construct
  source 1..20: mol_type = other DNA
agcctgggccccacatgagc

SEQ ID NO: 275656 - DNA, 20 bp, synthetic construct
  source 1..20: mol_type = other DNA
cagcctgggccccacatgag

SEQ ID NO: 275657 - DNA, 20 bp, synthetic construct
  source 1..20: mol_type = other DNA
gcagcctgggccccacatga

SEQ ID NO: 275658 - DNA, 20 bp, synthetic construct
  source 1..20: mol_type = other DNA
tgcagcctgggccccacatg

SEQ ID NO: 275659 - DNA, 20 bp, synthetic construct
  source 1..20: mol_type = other DNA
ctgcagcctgggccccacat

SEQ ID NO: 275660 - DNA, 20 bp, synthetic construct
  source 1..20: mol_type = other DNA
cctgcagcctgggccccaca

SEQ ID NO: 275661 - DNA, 20 bp, synthetic construct
  source 1..20: mol_type = other DNA
tcctgcagcctgggccccac

SEQ ID NO: 275662 - DNA, 20 bp, synthetic construct
  source 1..20: mol_type = other DNA
atcctgcagcctgggcccca

SEQ ID NO: 275663 - DNA, 20 bp, synthetic construct
  source 1..20: mol_type = other DNA
gatcctgcagcctgggcccc

SEQ ID NO: 275664 - DNA, 20 bp, synthetic construct
  source 1..20: mol_type = other DNA
tgatcctgcagcctgggccc

SEQ ID NO: 275665 - DNA, 20 bp, synthetic construct
  source 1..20: mol_type = other DNA
ctgatcctgcagcctgggcc

SEQ ID NO: 275666 - DNA, 20 bp, synthetic construct
  source 1..20: mol_type = other DNA
cctgatcctgcagcctgggc

SEQ ID NO: 275667 - DNA, 20 bp, synthetic construct
  source 1..20: mol_type = other DNA
tcctgatcctgcagcctggg

SEQ ID NO: 275668 - DNA, 20 bp, synthetic construct
  source 1..20: mol_type = other DNA
ctcctgatcctgcagcctgg

SEQ ID NO: 275669 - DNA, 20 bp, synthetic construct
  source 1..20: mol_type = other DNA
tctcctgatcctgcagcctg

SEQ ID NO: 275670 - DNA, 20 bp, synthetic construct
  source 1..20: mol_type = other DNA
ttctcctgatcctgcagcct

SEQ ID NO: 275671 - DNA, 20 bp, synthetic construct
  source 1..20: mol_type = other DNA
gttctcctgatcctgcagcc

SEQ ID NO: 275672 - DNA, 20 bp, synthetic construct
  source 1..20: mol_type = other DNA
agttctcctgatcctgcagc

SEQ ID NO: 275673 - DNA, 20 bp, synthetic construct
  source 1..20: mol_type = other DNA
cagttctcctgatcctgcag

SEQ ID NO: 275674 - DNA, 20 bp, synthetic construct
  source 1..20: mol_type = other DNA
ccagttctcctgatcctgca

SEQ ID NO: 275675 - DNA, 20 bp, synthetic construct
  source 1..20: mol_type = other DNA
cccagttctcctgatcctgc

SEQ ID NO: 275676 - DNA, 20 bp, synthetic construct
  source 1..20: mol_type = other DNA
ccccagttctcctgatcctg

SEQ ID NO: 275677 - DNA, 20 bp, synthetic construct
  source 1..20: mol_type = other DNA
tccccagttctcctgatcct

SEQ ID NO: 275678 - DNA, 20 bp, synthetic construct
  source 1..20: mol_type = other DNA
gtccccagttctcctgatcc

SEQ ID NO: 275679 - DNA, 20 bp, synthetic construct
  source 1..20: mol_type = other DNA
ggtccccagttctcctgatc

SEQ ID NO: 275680 - DNA, 20 bp, synthetic construct
  source 1..20: mol_type = other DNA
gggtccccagttctcctgat

SEQ ID NO: 275681 - DNA, 20 bp, synthetic construct
  source 1..20: mol_type = other DNA
agggtccccagttctcctga

SEQ ID NO: 275682 - DNA, 20 bp, synthetic construct
  source 1..20: mol_type = other DNA
cagggtccccagttctcctg

SEQ ID NO: 275683 - DNA, 20 bp, synthetic construct
  source 1..20: mol_type = other DNA
acagggtccccagttctcct

SEQ ID NO: 275684 - DNA, 20 bp, synthetic construct
  source 1..20: mol_type = other DNA
cacagggtccccagttctcc

SEQ ID NO: 275685 - DNA, 20 bp, synthetic construct
  source 1..20: mol_type = other DNA
tcacagggtccccagttctc

SEQ ID NO: 275686 - DNA, 20 bp, synthetic construct
  source 1..20: mol_type = other DNA
gtcacagggtccccagttct

SEQ ID NO: 275687 - DNA, 20 bp, synthetic construct
  source 1..20: mol_type = other DNA
agtcacagggtccccagttc

SEQ ID NO: 275688 - DNA, 20 bp, synthetic construct
  source 1..20: mol_type = other DNA
cagtcacagggtccccagtt

SEQ ID NO: 275689 - DNA, 20 bp, synthetic construct
  source 1..20: mol_type = other DNA
gcagtcacagggtccccagt

SEQ ID NO: 275690 - DNA, 20 bp, synthetic construct
  source 1..20: mol_type = other DNA
ggcagtcacagggtccccag

SEQ ID NO: 275691 - DNA, 20 bp, synthetic construct
  source 1..20: mol_type = other DNA
tggcagtcacagggtcccca

SEQ ID NO: 275692 - DNA, 20 bp, synthetic construct
  source 1..20: mol_type = other DNA
ctggcagtcacagggtcccc

SEQ ID NO: 275693 - DNA, 20 bp, synthetic construct
  source 1..20: mol_type = other DNA
gctggcagtcacagggtccc

SEQ ID NO: 275694 - DNA, 20 bp, synthetic construct
  source 1..20: mol_type = other DNA
cgctggcagtcacagggtcc

SEQ ID NO: 275695 - DNA, 20 bp, synthetic construct
  source 1..20: mol_type = other DNA
ccgctggcagtcacagggtc

SEQ ID NO: 275696 - DNA, 20 bp, synthetic construct
  source 1..20: mol_type = other DNA
cccgctggcagtcacagggt

SEQ ID NO: 275697 - DNA, 20 bp, synthetic construct
  source 1..20: mol_type = other DNA
ccccgctggcagtcacaggg

SEQ ID NO: 275698 - DNA, 20 bp, synthetic construct
  source 1..20: mol_type = other DNA
tccccgctggcagtcacagg

SEQ ID NO: 275699 - DNA, 20 bp, synthetic construct
  source 1..20: mol_type = other DNA
ctccccgctggcagtcacag

SEQ ID NO: 275700 - DNA, 20 bp, synthetic construct
  source 1..20: mol_type = other DNA
tctccccgctggcagtcaca

SEQ ID NO: 275701 - DNA, 20 bp, synthetic construct
  source 1..20: mol_type = other DNA
ttctccccgctggcagtcac

SEQ ID NO: 275702 - DNA, 20 bp, synthetic construct
  source 1..20: mol_type = other DNA
cttctccccgctggcagtca

SEQ ID NO: 275703 - DNA, 20 bp, synthetic construct
  source 1..20: mol_type = other DNA
ccttctccccgctggcagtc

SEQ ID NO: 275704 - DNA, 20 bp, synthetic construct
  source 1..20: mol_type = other DNA
cccttctccccgctggcagt

SEQ ID NO: 275705 - DNA, 20 bp, synthetic construct
  source 1..20: mol_type = other DNA
ccccttctccccgctggcag

SEQ ID NO: 275706 - DNA, 20 bp, synthetic construct
  source 1..20: mol_type = other DNA
cccccttctccccgctggca

SEQ ID NO: 275707 - DNA, 20 bp, synthetic construct
  source 1..20: mol_type = other DNA
acccccttctccccgctggc

SEQ ID NO: 275708 - DNA, 20 bp, synthetic construct
  source 1..20: mol_type = other DNA
cacccccttctccccgctgg

SEQ ID NO: 275709 - DNA, 20 bp, synthetic construct
  source 1..20: mol_type = other DNA
acacccccttctccccgctg

SEQ ID NO: 275710 - DNA, 20 bp, synthetic construct
  source 1..20: mol_type = other DNA
cacacccccttctccccgct

SEQ ID NO: 275711 - DNA, 20 bp, synthetic construct
  source 1..20: mol_type = other DNA
gcacacccccttctccccgc

SEQ ID NO: 275712 - DNA, 20 bp, synthetic construct
  source 1..20: mol_type = other DNA
tgcacacccccttctccccg

SEQ ID NO: 275713 - DNA, 20 bp, synthetic construct
  source 1..20: mol_type = other DNA
ctgcacacccccttctcccc

SEQ ID NO: 275714 - DNA, 20 bp, synthetic construct
  source 1..20: mol_type = other DNA
cctgcacacccccttctccc

SEQ ID NO: 275715 - DNA, 20 bp, synthetic construct
  source 1..20: mol_type = other DNA
tcctgcacacccccttctcc

SEQ ID NO: 275716 - DNA, 20 bp, synthetic construct
  source 1..20: mol_type = other DNA
atcctgcacacccccttctc

SEQ ID NO: 275717 - DNA, 20 bp, synthetic construct
  source 1..20: mol_type = other DNA
gatcctgcacacccccttct

SEQ ID NO: 275718 - DNA, 20 bp, synthetic construct
  source 1..20: mol_type = other DNA
tgatcctgcacacccccttc

SEQ ID NO: 275719 - DNA, 20 bp, synthetic construct
  source 1..20: mol_type = other DNA
atgatcctgcacaccccctt

SEQ ID NO: 275720 - DNA, 20 bp, synthetic construct
  source 1..20: mol_type = other DNA
catgatcctgcacaccccct

SEQ ID NO: 275721 - DNA, 20 bp, synthetic construct
  source 1..20: mol_type = other DNA
gcatgatcctgcacaccccc

SEQ ID NO: 275722 - DNA, 20 bp, synthetic construct
  source 1..20: mol_type = other DNA
ggcatgatcctgcacacccc

SEQ ID NO: 275723 - DNA, 20 bp, synthetic construct
  source 1..20: mol_type = other DNA
gggcatgatcctgcacaccc

SEQ ID NO: 275724 - DNA, 20 bp, synthetic construct
  source 1..20: mol_type = other DNA
tgggcatgatcctgcacacc

SEQ ID NO: 275725 - DNA, 20 bp, synthetic construct
  source 1..20: mol_type = other DNA
ctgggcatgatcctgcacac

SEQ ID NO: 275726 - DNA, 20 bp, synthetic construct
  source 1..20: mol_type = other DNA
cctgggcatgatcctgcaca

SEQ ID NO: 275727 - DNA, 20 bp, synthetic construct
  source 1..20: mol_type = other DNA
ccctgggcatgatcctgcac

SEQ ID NO: 275728 - DNA, 20 bp, synthetic construct
  source 1..20: mol_type = other DNA
tccctgggcatgatcctgca

SEQ ID NO: 275729 - DNA, 20 bp, synthetic construct
  source 1..20: mol_type = other DNA
ttccctgggcatgatcctgc

SEQ ID NO: 275730 - DNA, 20 bp, synthetic construct
  source 1..20: mol_type = other DNA
cttccctgggcatgatcctg

SEQ ID NO: 275731 - DNA, 20 bp, synthetic construct
  source 1..20: mol_type = other DNA
ccttccctgggcatgatcct

SEQ ID NO: 275732 - DNA, 20 bp, synthetic construct
  source 1..20: mol_type = other DNA
cccttccctgggcatgatcc

SEQ ID NO: 275733 - DNA, 20 bp, synthetic construct
  source 1..20: mol_type = other DNA
gcccttccctgggcatgatc

SEQ ID NO: 275734 - DNA, 20 bp, synthetic construct
  source 1..20: mol_type = other DNA
ggcccttccctgggcatgat

SEQ ID NO: 275735 - DNA, 20 bp, synthetic construct
  source 1..20: mol_type = other DNA
gggcccttccctgggcatga

SEQ ID NO: 275736 - DNA, 20 bp, synthetic construct
  source 1..20: mol_type = other DNA
tgggcccttccctgggcatg

SEQ ID NO: 275737 - DNA, 20 bp, synthetic construct
  source 1..20: mol_type = other DNA
ctgggcccttccctgggcat

SEQ ID NO: 275738 - DNA, 20 bp, synthetic construct
  source 1..20: mol_type = other DNA
cctgggcccttccctgggca

SEQ ID NO: 275739 - DNA, 20 bp, synthetic construct
  source 1..20: mol_type = other DNA
ccctgggcccttccctgggc

SEQ ID NO: 275740 - DNA, 20 bp, synthetic construct
  source 1..20: mol_type = other DNA
cccctgggcccttccctggg

SEQ ID NO: 275741 - DNA, 20 bp, synthetic construct
  source 1..20: mol_type = other DNA
gcccctgggcccttccctgg

SEQ ID NO: 275742 - DNA, 20 bp, synthetic construct
  source 1..20: mol_type = other DNA
ggcccctgggcccttccctg

SEQ ID NO: 275743 - DNA, 20 bp, synthetic construct
  source 1..20: mol_type = other DNA
gggcccctgggcccttccct

SEQ ID NO: 275744 - DNA, 20 bp, synthetic construct
  source 1..20: mol_type = other DNA
tgggcccctgggcccttccc

SEQ ID NO: 275745 - DNA, 20 bp, synthetic construct
  source 1..20: mol_type = other DNA
ttgggcccctgggcccttcc

SEQ ID NO: 275746 - DNA, 20 bp, synthetic construct
  source 1..20: mol_type = other DNA
cttgggcccctgggcccttc

SEQ ID NO: 275747 - DNA, 20 bp, synthetic construct
  source 1..20: mol_type = other DNA
gcttgggcccctgggccctt

SEQ ID NO: 275748 - DNA, 20 bp, synthetic construct
  source 1..20: mol_type = other DNA
tgcttgggcccctgggccct

SEQ ID NO: 275749 - DNA, 20 bp, synthetic construct
  source 1..20: mol_type = other DNA
atgcttgggcccctgggccc

SEQ ID NO: 275750 - DNA, 20 bp, synthetic construct
  source 1..20: mol_type = other DNA
catgcttgggcccctgggcc

SEQ ID NO: 275751 - DNA, 20 bp, synthetic construct
  source 1..20: mol_type = other DNA
ccatgcttgggcccctgggc

SEQ ID NO: 275752 - DNA, 20 bp, synthetic construct
  source 1..20: mol_type = other DNA
cccatgcttgggcccctggg

SEQ ID NO: 275753 - DNA, 20 bp, synthetic construct
  source 1..20: mol_type = other DNA
ccccatgcttgggcccctgg

SEQ ID NO: 275754 - DNA, 20 bp, synthetic construct
  source 1..20: mol_type = other DNA
cccccatgcttgggcccctg

SEQ ID NO: 275755 - DNA, 20 bp, synthetic construct
  source 1..20: mol_type = other DNA
ccccccatgcttgggcccct

SEQ ID NO: 275756 - DNA, 20 bp, synthetic construct
  source 1..20: mol_type = other DNA
cccccccatgcttgggcccc

SEQ ID NO: 275757 - DNA, 20 bp, synthetic construct
  source 1..20: mol_type = other DNA
gcccccccatgcttgggccc

SEQ ID NO: 275758 - DNA, 20 bp, synthetic construct
  source 1..20: mol_type = other DNA
ggcccccccatgcttgggcc

SEQ ID NO: 275759 - DNA, 20 bp, synthetic construct
  source 1..20: mol_type = other DNA
aggcccccccatgcttgggc

SEQ ID NO: 275760 - DNA, 20 bp, synthetic construct
  source 1..20: mol_type = other DNA
caggcccccccatgcttggg

SEQ ID NO: 275761 - DNA, 20 bp, synthetic construct
  source 1..20: mol_type = other DNA
ccaggcccccccatgcttgg

SEQ ID NO: 275762 - DNA, 20 bp, synthetic construct
  source 1..20: mol_type = other DNA
accaggcccccccatgcttg

SEQ ID NO: 275763 - DNA, 20 bp, synthetic construct
  source 1..20: mol_type = other DNA
aaccaggcccccccatgctt

SEQ ID NO: 275764 - DNA, 20 bp, synthetic construct
  source 1..20: mol_type = other DNA
caaccaggcccccccatgct

SEQ ID NO: 275765 - DNA, 20 bp, synthetic construct
  source 1..20: mol_type = other DNA
ccaaccaggcccccccatgc

SEQ ID NO: 275766 - DNA, 20 bp, synthetic construct
  source 1..20: mol_type = other DNA
gccaaccaggcccccccatg

SEQ ID NO: 275767 - DNA, 20 bp, synthetic construct
  source 1..20: mol_type = other DNA
agccaaccaggcccccccat

SEQ ID NO: 275768 - DNA, 20 bp, synthetic construct
  source 1..20: mol_type = other DNA
gagccaaccaggccccccca

SEQ ID NO: 275769 - DNA, 20 bp, synthetic construct
  source 1..20: mol_type = other DNA
agagccaaccaggccccccc

SEQ ID NO: 275770 - DNA, 20 bp, synthetic construct
  source 1..20: mol_type = other DNA
cagagccaaccaggcccccc

SEQ ID NO: 275771 - DNA, 20 bp, synthetic construct
  source 1..20: mol_type = other DNA
tcagagccaaccaggccccc

SEQ ID NO: 275772 - DNA, 20 bp, synthetic construct
  source 1..20: mol_type = other DNA
ctcagagccaaccaggcccc

SEQ ID NO: 275773 - DNA, 20 bp, synthetic construct
  source 1..20: mol_type = other DNA
tctcagagccaaccaggccc

SEQ ID NO: 275774 - DNA, 20 bp, synthetic construct
  source 1..20: mol_type = other DNA
ttctcagagccaaccaggcc

SEQ ID NO: 275775 - DNA, 20 bp, synthetic construct
  source 1..20: mol_type = other DNA
cttctcagagccaaccaggc

SEQ ID NO: 275776 - DNA, 20 bp, synthetic construct
  source 1..20: mol_type = other DNA
tcttctcagagccaaccagg

SEQ ID NO: 275777 - DNA, 20 bp, synthetic construct
  source 1..20: mol_type = other DNA
atcttctcagagccaaccag

SEQ ID NO: 275778 - DNA, 20 bp, synthetic construct
  source 1..20: mol_type = other DNA
catcttctcagagccaacca

SEQ ID NO: 275779 - DNA, 20 bp, synthetic construct
  source 1..20: mol_type = other DNA
ccatcttctcagagccaacc

SEQ ID NO: 275780 - DNA, 20 bp, synthetic construct
  source 1..20: mol_type = other DNA
tccatcttctcagagccaac

SEQ ID NO: 275781 - DNA, 20 bp, synthetic construct
  source 1..20: mol_type = other DNA
ctccatcttctcagagccaa

SEQ ID NO: 275782 - DNA, 20 bp, synthetic construct
  source 1..20: mol_type = other DNA
gctccatcttctcagagcca

SEQ ID NO: 275783 - DNA, 20 bp, synthetic construct
  source 1..20: mol_type = other DNA
agctccatcttctcagagcc

SEQ ID NO: 275784 - DNA, 20 bp, synthetic construct
  source 1..20: mol_type = other DNA
tagctccatcttctcagagc

SEQ ID NO: 275785 - DNA, 20 bp, synthetic construct
  source 1..20: mol_type = other DNA
ttagctccatcttctcagag

SEQ ID NO: 275786 - DNA, 20 bp, synthetic construct
  source 1..20: mol_type = other DNA
tttagctccatcttctcaga

SEQ ID NO: 275787 - DNA, 20 bp, synthetic construct
  source 1..20: mol_type = other DNA
ctttagctccatcttctcag

SEQ ID NO: 275788 - DNA, 20 bp, synthetic construct
  source 1..20: mol_type = other DNA
actttagctccatcttctca

SEQ ID NO: 275789 - DNA, 20 bp, synthetic construct
  source 1..20: mol_type = other DNA
gactttagctccatcttctc

SEQ ID NO: 275790 - DNA, 20 bp, synthetic construct
  source 1..20: mol_type = other DNA
tgactttagctccatcttct

SEQ ID NO: 275791 - DNA, 20 bp, synthetic construct
  source 1..20: mol_type = other DNA
gtgactttagctccatcttc

SEQ ID NO: 275792 - DNA, 20 bp, synthetic construct
  source 1..20: mol_type = other DNA
agtgactttagctccatctt

SEQ ID NO: 275793 - DNA, 20 bp, synthetic construct
  source 1..20: mol_type = other DNA
aagtgactttagctccatct

SEQ ID NO: 275794 - DNA, 20 bp, synthetic construct
  source 1..20: mol_type = other DNA
aaagtgactttagctccatc

SEQ ID NO: 275795 - DNA, 20 bp, synthetic construct
  source 1..20: mol_type = other DNA
gaaagtgactttagctccat

SEQ ID NO: 275796 - DNA, 20 bp, synthetic construct
  source 1..20: mol_type = other DNA
agaaagtgactttagctcca

SEQ ID NO: 275797 - DNA, 20 bp, synthetic construct
  source 1..20: mol_type = other DNA
gagaaagtgactttagctcc

SEQ ID NO: 275798 - DNA, 20 bp, synthetic construct
  source 1..20: mol_type = other DNA
cgagaaagtgactttagctc

SEQ ID NO: 275799 - DNA, 20 bp, synthetic construct
  source 1..20: mol_type = other DNA
ccgagaaagtgactttagct

SEQ ID NO: 275800 - DNA, 20 bp, synthetic construct
  source 1..20: mol_type = other DNA
tccgagaaagtgactttagc

SEQ ID NO: 275801 - DNA, 20 bp, synthetic construct
  source 1..20: mol_type = other DNA
ctccgagaaagtgactttag

SEQ ID NO: 275802 - DNA, 20 bp, synthetic construct
  source 1..20: mol_type = other DNA
cctccgagaaagtgacttta

SEQ ID NO: 275803 - DNA, 20 bp, synthetic construct
  source 1..20: mol_type = other DNA
tcctccgagaaagtgacttt

SEQ ID NO: 275804 - DNA, 20 bp, synthetic construct
  source 1..20: mol_type = other DNA
atcctccgagaaagtgactt

SEQ ID NO: 275805 - DNA, 20 bp, synthetic construct
  source 1..20: mol_type = other DNA
catcctccgagaaagtgact

SEQ ID NO: 275806 - DNA, 20 bp, synthetic construct
  source 1..20: mol_type = other DNA
acatcctccgagaaagtgac

SEQ ID NO: 275807 - DNA, 20 bp, synthetic construct
  source 1..20: mol_type = other DNA
gacatcctccgagaaagtga

SEQ ID NO: 275808 - DNA, 20 bp, synthetic construct
  source 1..20: mol_type = other DNA
ggacatcctccgagaaagtg

SEQ ID NO: 275809 - DNA, 20 bp, synthetic construct
  source 1..20: mol_type = other DNA
tggacatcctccgagaaagt

SEQ ID NO: 275810 - DNA, 20 bp, synthetic construct
  source 1..20: mol_type = other DNA
ctggacatcctccgagaaag

SEQ ID NO: 275811 - DNA, 20 bp, synthetic construct
  source 1..20: mol_type = other DNA
cctggacatcctccgagaaa

SEQ ID NO: 275812 - DNA, 20 bp, synthetic construct
  source 1..20: mol_type = other DNA
gcctggacatcctccgagaa

SEQ ID NO: 275813 - DNA, 20 bp, synthetic construct
  source 1..20: mol_type = other DNA
ggcctggacatcctccgaga

SEQ ID NO: 275814 - DNA, 20 bp, synthetic construct
  source 1..20: mol_type = other DNA
tggcctggacatcctccgag

SEQ ID NO: 275815 - DNA, 20 bp, synthetic construct
  source 1..20: mol_type = other DNA
ttggcctggacatcctccga

SEQ ID NO: 275816 - DNA, 20 bp, synthetic construct
  source 1..20: mol_type = other DNA
attggcctggacatcctccg

SEQ ID NO: 275817 - DNA, 20 bp, synthetic construct
  source 1..20: mol_type = other DNA
tattggcctggacatcctcc

SEQ ID NO: 275818 - DNA, 20 bp, synthetic construct
  source 1..20: mol_type = other DNA
ctattggcctggacatcctc

SEQ ID NO: 275819 - DNA, 20 bp, synthetic construct
  source 1..20: mol_type = other DNA
actattggcctggacatcct

SEQ ID NO: 275820 - DNA, 20 bp, synthetic construct
  source 1..20: mol_type = other DNA
aactattggcctggacatcc

SEQ ID NO: 275821 - DNA, 20 bp, synthetic construct
  source 1..20: mol_type = other DNA
caactattggcctggacatc

SEQ ID NO: 275822 - DNA, 20 bp, synthetic construct
  source 1..20: mol_type = other DNA
ccaactattggcctggacat

SEQ ID NO: 275823 - DNA, 20 bp, synthetic construct
  source 1..20: mol_type = other DNA
cccaactattggcctggaca

SEQ ID NO: 275824 - DNA, 20 bp, synthetic construct
  source 1..20: mol_type = other DNA
tcccaactattggcctggac

SEQ ID NO: 275825 - DNA, 20 bp, synthetic construct
  source 1..20: mol_type = other DNA
atcccaactattggcctgga

SEQ ID NO: 275826 - DNA, 20 bp, synthetic construct
  source 1..20: mol_type = other DNA
catcccaactattggcctgg

SEQ ID NO: 275827 - DNA, 20 bp, synthetic construct
  source 1..20: mol_type = other DNA
acatcccaactattggcctg

SEQ ID NO: 275828 - DNA, 20 bp, synthetic construct
  source 1..20: mol_type = other DNA
cacatcccaactattggcct

SEQ ID NO: 275829 - DNA, 20 bp, synthetic construct
  source 1..20: mol_type = other DNA
tcacatcccaactattggcc

SEQ ID NO: 275830 - DNA, 20 bp, synthetic construct
  source 1..20: mol_type = other DNA
ttcacatcccaactattggc

SEQ ID NO: 275831 - DNA, 20 bp, synthetic construct
  source 1..20: mol_type = other DNA
cttcacatcccaactattgg

SEQ ID NO: 275832 - DNA, 20 bp, synthetic construct
  source 1..20: mol_type = other DNA
tcttcacatcccaactattg

SEQ ID NO: 275833 - DNA, 20 bp, synthetic construct
  source 1..20: mol_type = other DNA
gtcttcacatcccaactatt

SEQ ID NO: 275834 - DNA, 20 bp, synthetic construct
  source 1..20: mol_type = other DNA
cgtcttcacatcccaactat

SEQ ID NO: 275835 - DNA, 20 bp, synthetic construct
  source 1..20: mol_type = other DNA
acgtcttcacatcccaacta

SEQ ID NO: 275836 - DNA, 20 bp, synthetic construct
  source 1..20: mol_type = other DNA
cacgtcttcacatcccaact

SEQ ID NO: 275837 - DNA, 20 bp, synthetic construct
  source 1..20: mol_type = other DNA
tcacgtcttcacatcccaac

SEQ ID NO: 275838 - DNA, 20 bp, synthetic construct
  source 1..20: mol_type = other DNA
ttcacgtcttcacatcccaa

SEQ ID NO: 275839 - DNA, 20 bp, synthetic construct
  source 1..20: mol_type = other DNA
cttcacgtcttcacatccca

SEQ ID NO: 275840 - DNA, 20 bp, synthetic construct
  source 1..20: mol_type = other DNA
gcttcacgtcttcacatccc

SEQ ID NO: 275841 - DNA, 20 bp, synthetic construct
  source 1..20: mol_type = other DNA
tgcttcacgtcttcacatcc

SEQ ID NO: 275842 - DNA, 20 bp, synthetic construct
  source 1..20: mol_type = other DNA
ctgcttcacgtcttcacatc

SEQ ID NO: 275843 - DNA, 20 bp, synthetic construct
  source 1..20: mol_type = other DNA
gctgcttcacgtcttcacat

SEQ ID NO: 275844 - DNA, 20 bp, synthetic construct
  source 1..20: mol_type = other DNA
tgctgcttcacgtcttcaca

SEQ ID NO: 275845 - DNA, 20 bp, synthetic construct
  source 1..20: mol_type = other DNA
gtgctgcttcacgtcttcac

SEQ ID NO: 275846 - DNA, 20 bp, synthetic construct
  source 1..20: mol_type = other DNA
tgtgctgcttcacgtcttca

SEQ ID NO: 275847 - DNA, 20 bp, synthetic construct
  source 1..20: mol_type = other DNA
ctgtgctgcttcacgtcttc

SEQ ID NO: 275848 - DNA, 20 bp, synthetic construct
  source 1..20: mol_type = other DNA
tctgtgctgcttcacgtctt

SEQ ID NO: 275849 - DNA, 20 bp, synthetic construct
  source 1..20: mol_type = other DNA
ctctgtgctgcttcacgtct

SEQ ID NO: 275850 - DNA, 20 bp, synthetic construct
  source 1..20: mol_type = other DNA
gctctgtgctgcttcacgtc

SEQ ID NO: 275851 - DNA, 20 bp, synthetic construct
  source 1..20: mol_type = other DNA
ggctctgtgctgcttcacgt

SEQ ID NO: 275852 - DNA, 20 bp, synthetic construct
  source 1..20: mol_type = other DNA
aggctctgtgctgcttcacg

SEQ ID NO: 275853 - DNA, 20 bp, synthetic construct
  source 1..20: mol_type = other DNA
caggctctgtgctgcttcac

SEQ ID NO: 275854 - DNA, 20 bp, synthetic construct
  source 1..20: mol_type = other DNA
ccaggctctgtgctgcttca

SEQ ID NO: 275855 - DNA, 20 bp, synthetic construct
  source 1..20: mol_type = other DNA
tccaggctctgtgctgcttc

SEQ ID NO: 275856 - DNA, 20 bp, synthetic construct
  source 1..20: mol_type = other DNA
ttccaggctctgtgctgctt

SEQ ID NO: 275857 - DNA, 20 bp, synthetic construct
  source 1..20: mol_type = other DNA
cttccaggctctgtgctgct

SEQ ID NO: 275858 - DNA, 20 bp, synthetic construct
  source 1..20: mol_type = other DNA
gcttccaggctctgtgctgc

SEQ ID NO: 275859 - DNA, 20 bp, synthetic construct
  source 1..20: mol_type = other DNA
ggcttccaggctctgtgctg

SEQ ID NO: 275860 - DNA, 20 bp, synthetic construct
  source 1..20: mol_type = other DNA
gggcttccaggctctgtgct

SEQ ID NO: 275861 - DNA, 20 bp, synthetic construct
  source 1..20: mol_type = other DNA
tgggcttccaggctctgtgc

SEQ ID NO: 275862 - DNA, 20 bp, synthetic construct
  source 1..20: mol_type = other DNA
ctgggcttccaggctctgtg

SEQ ID NO: 275863 - DNA, 20 bp, synthetic construct
  source 1..20: mol_type = other DNA
cctgggcttccaggctctgt

SEQ ID NO: 275864 - DNA, 20 bp, synthetic construct
  source 1..20: mol_type = other DNA
tcctgggcttccaggctctg

SEQ ID NO: 275865 - DNA, 20 bp, synthetic construct
  source 1..20: mol_type = other DNA
atcctgggcttccaggctct

SEQ ID NO: 275866 - DNA, 20 bp, synthetic construct
  source 1..20: mol_type = other DNA
catcctgggcttccaggctc

SEQ ID NO: 275867 - DNA, 20 bp, synthetic construct
  source 1..20: mol_type = other DNA
ccatcctgggcttccaggct

SEQ ID NO: 275868 - DNA, 20 bp, synthetic construct
  source 1..20: mol_type = other DNA
tccatcctgggcttccaggc

SEQ ID NO: 275869 - DNA, 20 bp, synthetic construct
  source 1..20: mol_type = other DNA
gtccatcctgggcttccagg

SEQ ID NO: 275870 - DNA, 20 bp, synthetic construct
  source 1..20: mol_type = other DNA
tgtccatcctgggcttccag

SEQ ID NO: 275871 - DNA, 20 bp, synthetic construct
  source 1..20: mol_type = other DNA
ctgtccatcctgggcttcca

SEQ ID NO: 275872 - DNA, 20 bp, synthetic construct
  source 1..20: mol_type = other DNA
tctgtccatcctgggcttcc

SEQ ID NO: 275873 - DNA, 20 bp, synthetic construct
  source 1..20: mol_type = other DNA
ttctgtccatcctgggcttc

SEQ ID NO: 275874 - DNA, 20 bp, synthetic construct
  source 1..20: mol_type = other DNA
tttctgtccatcctgggctt

SEQ ID NO: 275875 - DNA, 20 bp, synthetic construct
  source 1..20: mol_type = other DNA
gtttctgtccatcctgggct

SEQ ID NO: 275876 - DNA, 20 bp, synthetic construct
  source 1..20: mol_type = other DNA
ggtttctgtccatcctgggc

SEQ ID NO: 275877 - DNA, 20 bp, synthetic construct
  source 1..20: mol_type = other DNA
aggtttctgtccatcctggg

SEQ ID NO: 275878 - DNA, 20 bp, synthetic construct
  source 1..20: mol_type = other DNA
taggtttctgtccatcctgg

SEQ ID NO: 275879 - DNA, 20 bp, synthetic construct
  source 1..20: mol_type = other DNA
gtaggtttctgtccatcctg

SEQ ID NO: 275880 - DNA, 20 bp, synthetic construct
  source 1..20: mol_type = other DNA
ggtaggtttctgtccatcct

SEQ ID NO: 275881 - DNA, 20 bp, synthetic construct
  source 1..20: mol_type = other DNA
aggtaggtttctgtccatcc

SEQ ID NO: 275882 - DNA, 20 bp, synthetic construct
  source 1..20: mol_type = other DNA
caggtaggtttctgtccatc

SEQ ID NO: 275883 - DNA, 20 bp, synthetic construct
  source 1..20: mol_type = other DNA
tcaggtaggtttctgtccat

SEQ ID NO: 275884 - DNA, 20 bp, synthetic construct
  source 1..20: mol_type = other DNA
ctcaggtaggtttctgtcca

SEQ ID NO: 275885 - DNA, 20 bp, synthetic construct
  source 1..20: mol_type = other DNA
gctcaggtaggtttctgtcc

SEQ ID NO: 275886 - DNA, 20 bp, synthetic construct
  source 1..20: mol_type = other DNA
tgctcaggtaggtttctgtc

SEQ ID NO: 275887 - DNA, 20 bp, synthetic construct
  source 1..20: mol_type = other DNA
ctgctcaggtaggtttctgt

SEQ ID NO: 275888 - DNA, 20 bp, synthetic construct
  source 1..20: mol_type = other DNA
actgctcaggtaggtttctg

SEQ ID NO: 275889 - DNA, 20 bp, synthetic construct
  source 1..20: mol_type = other DNA
cactgctcaggtaggtttct

SEQ ID NO: 275890 - DNA, 20 bp, synthetic construct
  source 1..20: mol_type = other DNA
ccactgctcaggtaggtttc

SEQ ID NO: 275891 - DNA, 20 bp, synthetic construct
  source 1..20: mol_type = other DNA
cccactgctcaggtaggttt

SEQ ID NO: 275892 - DNA, 20 bp, synthetic construct
  source 1..20: mol_type = other DNA
ccccactgctcaggtaggtt

SEQ ID NO: 275893 - DNA, 20 bp, synthetic construct
  source 1..20: mol_type = other DNA
gccccactgctcaggtaggt

SEQ ID NO: 275894 - DNA, 20 bp, synthetic construct
  source 1..20: mol_type = other DNA
agccccactgctcaggtagg

SEQ ID NO: 275895 - DNA, 20 bp, synthetic construct
  source 1..20: mol_type = other DNA
aagccccactgctcaggtag

SEQ ID NO: 275896 - DNA, 20 bp, synthetic construct
  source 1..20: mol_type = other DNA
aaagccccactgctcaggta

SEQ ID NO: 275897 - DNA, 20 bp, synthetic construct
  source 1..20: mol_type = other DNA
caaagccccactgctcaggt

SEQ ID NO: 275898 - DNA, 20 bp, synthetic construct
  source 1..20: mol_type = other DNA
tcaaagccccactgctcagg

SEQ ID NO: 275899 - DNA, 20 bp, synthetic construct
  source 1..20: mol_type = other DNA
ttcaaagccccactgctcag

SEQ ID NO: 275900 - DNA, 20 bp, synthetic construct
  source 1..20: mol_type = other DNA
tttcaaagccccactgctca

SEQ ID NO: 275901 - DNA, 20 bp, synthetic construct
  source 1..20: mol_type = other DNA
ctttcaaagccccactgctc

SEQ ID NO: 275902 - DNA, 20 bp, synthetic construct
  source 1..20: mol_type = other DNA
gctttcaaagccccactgct

SEQ ID NO: 275903 - DNA, 20 bp, synthetic construct
  source 1..20: mol_type = other DNA
ggctttcaaagccccactgc

SEQ ID NO: 275904 - DNA, 20 bp, synthetic construct
  source 1..20: mol_type = other DNA
aggctttcaaagccccactg

SEQ ID NO: 275905 - DNA, 20 bp, synthetic construct
  source 1..20: mol_type = other DNA
aaggctttcaaagccccact

SEQ ID NO: 275906 - DNA, 20 bp, synthetic construct
  source 1..20: mol_type = other DNA
caaggctttcaaagccccac

SEQ ID NO: 275907 - DNA, 20 bp, synthetic construct
  source 1..20: mol_type = other DNA
ccaaggctttcaaagcccca

SEQ ID NO: 275908 - DNA, 20 bp, synthetic construct
  source 1..20: mol_type = other DNA
cccaaggctttcaaagcccc

SEQ ID NO: 275909 - DNA, 20 bp, synthetic construct
  source 1..20: mol_type = other DNA
ccccaaggctttcaaagccc

SEQ ID NO: 275910 - DNA, 20 bp, synthetic construct
  source 1..20: mol_type = other DNA
gccccaaggctttcaaagcc

SEQ ID NO: 275911 - DNA, 20 bp, synthetic construct
  source 1..20: mol_type = other DNA
cgccccaaggctttcaaagc

SEQ ID NO: 275912 - DNA, 20 bp, synthetic construct
  source 1..20: mol_type = other DNA
ccgccccaaggctttcaaag

SEQ ID NO: 275913 - DNA, 20 bp, synthetic construct
  source 1..20: mol_type = other DNA
cccgccccaaggctttcaaa

SEQ ID NO: 275914 - DNA, 20 bp, synthetic construct
  source 1..20: mol_type = other DNA
ccccgccccaaggctttcaa

SEQ ID NO: 275915 - DNA, 20 bp, synthetic construct
  source 1..20: mol_type = other DNA
cccccgccccaaggctttca

SEQ ID NO: 275916 - DNA, 20 bp, synthetic construct
  source 1..20: mol_type = other DNA
ccccccgccccaaggctttc

SEQ ID NO: 275917 - DNA, 20 bp, synthetic construct
  source 1..20: mol_type = other DNA
accccccgccccaaggcttt

SEQ ID NO: 275918 - DNA, 20 bp, synthetic construct
  source 1..20: mol_type = other DNA
caccccccgccccaaggctt

SEQ ID NO: 275919 - DNA, 20 bp, synthetic construct
  source 1..20: mol_type = other DNA
gcaccccccgccccaaggct

SEQ ID NO: 275920 - DNA, 20 bp, synthetic construct
  source 1..20: mol_type = other DNA
tgcaccccccgccccaaggc

SEQ ID NO: 275921 - DNA, 20 bp, synthetic construct
  source 1..20: mol_type = other DNA
ttgcaccccccgccccaagg

SEQ ID NO: 275922 - DNA, 20 bp, synthetic construct
  source 1..20: mol_type = other DNA
attgcaccccccgccccaag

SEQ ID NO: 275923 - DNA, 20 bp, synthetic construct
  source 1..20: mol_type = other DNA
tattgcaccccccgccccaa

SEQ ID NO: 275924 - DNA, 20 bp, synthetic construct
  source 1..20: mol_type = other DNA
atattgcaccccccgcccca

SEQ ID NO: 275925 - DNA, 20 bp, synthetic construct
  source 1..20: mol_type = other DNA
aatattgcaccccccgcccc

SEQ ID NO: 275926 - DNA, 20 bp, synthetic construct
  source 1..20: mol_type = other DNA
gaatattgcaccccccgccc

SEQ ID NO: 275927 - DNA, 20 bp, synthetic construct
  source 1..20: mol_type = other DNA
tgaatattgcaccccccgcc

SEQ ID NO: 275928 - DNA, 20 bp, synthetic construct
  source 1..20: mol_type = other DNA
ttgaatattgcaccccccgc

SEQ ID NO: 275929 - DNA, 20 bp, synthetic construct
  source 1..20: mol_type = other DNA
cttgaatattgcaccccccg

SEQ ID NO: 275930 - DNA, 20 bp, synthetic construct
  source 1..20: mol_type = other DNA
tcttgaatattgcacccccc

SEQ ID NO: 275931 - DNA, 20 bp, synthetic construct
  source 1..20: mol_type = other DNA
atcttgaatattgcaccccc

SEQ ID NO: 275932 - DNA, 20 bp, synthetic construct
  source 1..20: mol_type = other DNA
catcttgaatattgcacccc

SEQ ID NO: 275933 - DNA, 20 bp, synthetic construct
  source 1..20: mol_type = other DNA
ccatcttgaatattgcaccc

SEQ ID NO: 275934 - DNA, 20 bp, synthetic construct
  source 1..20: mol_type = other DNA
gccatcttgaatattgcacc

SEQ ID NO: 275935 - DNA, 20 bp, synthetic construct
  source 1..20: mol_type = other DNA
ggccatcttgaatattgcac

SEQ ID NO: 275936 - DNA, 20 bp, synthetic construct
  source 1..20: mol_type = other DNA
tggccatcttgaatattgca

SEQ ID NO: 275937 - DNA, 20 bp, synthetic construct
  source 1..20: mol_type = other DNA
gtggccatcttgaatattgc

SEQ ID NO: 275938 - DNA, 20 bp, synthetic construct
  source 1..20: mol_type = other DNA
tgtggccatcttgaatattg

SEQ ID NO: 275939 - DNA, 20 bp, synthetic construct
  source 1..20: mol_type = other DNA
ttgtggccatcttgaatatt

SEQ ID NO: 275940 - DNA, 20 bp, synthetic construct
  source 1..20: mol_type = other DNA
cttgtggccatcttgaatat

SEQ ID NO: 275941 - DNA, 20 bp, synthetic construct
  source 1..20: mol_type = other DNA
tcttgtggccatcttgaata

SEQ ID NO: 275942 - DNA, 20 bp, synthetic construct
  source 1..20: mol_type = other DNA
atcttgtggccatcttgaat

SEQ ID NO: 275943 - DNA, 20 bp, synthetic construct
  source 1..20: mol_type = other DNA
catcttgtggccatcttgaa

SEQ ID NO: 275944 - DNA, 20 bp, synthetic construct
  source 1..20: mol_type = other DNA
ccatcttgtggccatcttga

SEQ ID NO: 275945 - DNA, 20 bp, synthetic construct
  source 1..20: mol_type = other DNA
gccatcttgtggccatcttg

SEQ ID NO: 275946 - DNA, 20 bp, synthetic construct
  source 1..20: mol_type = other DNA
tgccatcttgtggccatctt

SEQ ID NO: 275947 - DNA, 20 bp, synthetic construct
  source 1..20: mol_type = other DNA
ttgccatcttgtggccatct

SEQ ID NO: 275948 - DNA, 20 bp, synthetic construct
  source 1..20: mol_type = other DNA
attgccatcttgtggccatc

SEQ ID NO: 275949 - DNA, 20 bp, synthetic construct
  source 1..20: mol_type = other DNA
tattgccatcttgtggccat

SEQ ID NO: 275950 - DNA, 20 bp, synthetic construct
  source 1..20: mol_type = other DNA
ctattgccatcttgtggcca

SEQ ID NO: 275951 - DNA, 20 bp, synthetic construct
  source 1..20: mol_type = other DNA
tctattgccatcttgtggcc

SEQ ID NO: 275952 - DNA, 20 bp, synthetic construct
  source 1..20: mol_type = other DNA
ttctattgccatcttgtggc

SEQ ID NO: 275953 - DNA, 20 bp, synthetic construct
  source 1..20: mol_type = other DNA
attctattgccatcttgtgg

SEQ ID NO: 275954 - DNA, 20 bp, synthetic construct
  source 1..20: mol_type = other DNA
cattctattgccatcttgtg

SEQ ID NO: 275955 - DNA, 20 bp, synthetic construct
  source 1..20: mol_type = other DNA
gcattctattgccatcttgt

SEQ ID NO: 275956 - DNA, 20 bp, synthetic construct
  source 1..20: mol_type = other DNA
agcattctattgccatcttg

SEQ ID NO: 275957 - DNA, 20 bp, synthetic construct
  source 1..20: mol_type = other DNA
cagcattctattgccatctt

SEQ ID NO: 275958 - DNA, 20 bp, synthetic construct
  source 1..20: mol_type = other DNA
acagcattctattgccatct

SEQ ID NO: 275959 - DNA, 20 bp, synthetic construct
  source 1..20: mol_type = other DNA
tacagcattctattgccatc

SEQ ID NO: 275960 - DNA, 20 bp, synthetic construct
  source 1..20: mol_type = other DNA
ttacagcattctattgccat

SEQ ID NO: 275961 - DNA, 20 bp, synthetic construct
  source 1..20: mol_type = other DNA
gttacagcattctattgcca

SEQ ID NO: 275962 - DNA, 20 bp, synthetic construct
  source 1..20: mol_type = other DNA
agttacagcattctattgcc

SEQ ID NO: 275963 - DNA, 20 bp, synthetic construct
  source 1..20: mol_type = other DNA
aagttacagcattctattgc

SEQ ID NO: 275964 - DNA, 20 bp, synthetic construct
  source 1..20: mol_type = other DNA
aaagttacagcattctattg

SEQ ID NO: 275965 - DNA, 20 bp, synthetic construct
  source 1..20: mol_type = other DNA
gaaagttacagcattctatt

SEQ ID NO: 275966 - DNA, 20 bp, synthetic construct
  source 1..20: mol_type = other DNA
agaaagttacagcattctat

SEQ ID NO: 275967 - DNA, 20 bp, synthetic construct
  source 1..20: mol_type = other DNA
aagaaagttacagcattcta

SEQ ID NO: 275968 - DNA, 20 bp, synthetic construct
  source 1..20: mol_type = other DNA
caagaaagttacagcattct

SEQ ID NO: 275969 - DNA, 20 bp, synthetic construct
  source 1..20: mol_type = other DNA
ccaagaaagttacagcattc

SEQ ID NO: 275970 - DNA, 20 bp, synthetic construct
  source 1..20: mol_type = other DNA
accaagaaagttacagcatt

SEQ ID NO: 275971 - DNA, 20 bp, synthetic construct
  source 1..20: mol_type = other DNA
aaccaagaaagttacagcat

SEQ ID NO: 275972 - DNA, 20 bp, synthetic construct
  source 1..20: mol_type = other DNA
gaaccaagaaagttacagca

SEQ ID NO: 275973 - DNA, 20 bp, synthetic construct
  source 1..20: mol_type = other DNA
agaaccaagaaagttacagc

SEQ ID NO: 275974 - DNA, 20 bp, synthetic construct
  source 1..20: mol_type = other DNA
cagaaccaagaaagttacag

SEQ ID NO: 275975 - DNA, 20 bp, synthetic construct
  source 1..20: mol_type = other DNA
ccagaaccaagaaagttaca

SEQ ID NO: 275976 - DNA, 20 bp, synthetic construct
  source 1..20: mol_type = other DNA
cccagaaccaagaaagttac

SEQ ID NO: 275977 - DNA, 20 bp, synthetic construct
  source 1..20: mol_type = other DNA
gcccagaaccaagaaagtta

SEQ ID NO: 275978 - DNA, 20 bp, synthetic construct
  source 1..20: mol_type = other DNA
ggcccagaaccaagaaagtt

SEQ ID NO: 275979 - DNA, 20 bp, synthetic construct
  source 1..20: mol_type = other DNA
cggcccagaaccaagaaagt

SEQ ID NO: 275980 - DNA, 20 bp, synthetic construct
  source 1..20: mol_type = other DNA
gcggcccagaaccaagaaag

SEQ ID NO: 275981 - DNA, 20 bp, synthetic construct
  source 1..20: mol_type = other DNA
tgcggcccagaaccaagaaa

SEQ ID NO: 275982 - DNA, 20 bp, synthetic construct
  source 1..20: mol_type = other DNA
ctgcggcccagaaccaagaa

SEQ ID NO: 275983 - DNA, 20 bp, synthetic construct
  source 1..20: mol_type = other DNA
gctgcggcccagaaccaaga

SEQ ID NO: 275984 - DNA, 20 bp, synthetic construct
  source 1..20: mol_type = other DNA
ggctgcggcccagaaccaag

SEQ ID NO: 275985 - DNA, 20 bp, synthetic construct
  source 1..20: mol_type = other DNA
aggctgcggcccagaaccaa

SEQ ID NO: 275986 - DNA, 20 bp, synthetic construct
  source 1..20: mol_type = other DNA
caggctgcggcccagaacca

SEQ ID NO: 275987 - DNA, 20 bp, synthetic construct
  source 1..20: mol_type = other DNA
ccaggctgcggcccagaacc

SEQ ID NO: 275988 - DNA, 20 bp, synthetic construct
  source 1..20: mol_type = other DNA
cccaggctgcggcccagaac

SEQ ID NO: 275989 - DNA, 20 bp, synthetic construct
  source 1..20: mol_type = other DNA
acccaggctgcggcccagaa

SEQ ID NO: 275990 - DNA, 20 bp, synthetic construct
  source 1..20: mol_type = other DNA
cacccaggctgcggcccaga

SEQ ID NO: 275991 - DNA, 20 bp, synthetic construct
  source 1..20: mol_type = other DNA
ccacccaggctgcggcccag

SEQ ID NO: 275992 - DNA, 20 bp, synthetic construct
  source 1..20: mol_type = other DNA
gccacccaggctgcggccca

SEQ ID NO: 275993 - DNA, 20 bp, synthetic construct
  source 1..20: mol_type = other DNA
agccacccaggctgcggccc

SEQ ID NO: 275994 - DNA, 20 bp, synthetic construct
  source 1..20: mol_type = other DNA
cagccacccaggctgcggcc

SEQ ID NO: 275995 - DNA, 20 bp, synthetic construct
  source 1..20: mol_type = other DNA
gcagccacccaggctgcggc

SEQ ID NO: 275996 - DNA, 20 bp, synthetic construct
  source 1..20: mol_type = other DNA
agcagccacccaggctgcgg

SEQ ID NO: 275997 - DNA, 20 bp, synthetic construct
  source 1..20: mol_type = other DNA
aagcagccacccaggctgcg

SEQ ID NO: 275998 - DNA, 20 bp, synthetic construct
  source 1..20: mol_type = other DNA
gaagcagccacccaggctgc

SEQ ID NO: 275999 - DNA, 20 bp, synthetic construct
  source 1..20: mol_type = other DNA
ggaagcagccacccaggctg

SEQ ID NO: 276000 - DNA, 20 bp, synthetic construct
  source 1..20: mol_type = other DNA
aggaagcagccacccaggct

SEQ ID NO: 276001 - DNA, 20 bp, synthetic construct
  source 1..20: mol_type = other DNA
aaggaagcagccacccaggc

SEQ ID NO: 276002 - DNA, 20 bp, synthetic construct
  source 1..20: mol_type = other DNA
gaaggaagcagccacccagg

SEQ ID NO: 276003 - DNA, 20 bp, synthetic construct
  source 1..20: mol_type = other DNA
ggaaggaagcagccacccag

SEQ ID NO: 276004 - DNA, 20 bp, synthetic construct
  source 1..20: mol_type = other DNA
gggaaggaagcagccaccca

SEQ ID NO: 276005 - DNA, 20 bp, synthetic construct
  source 1..20: mol_type = other DNA
agggaaggaagcagccaccc

SEQ ID NO: 276006 - DNA, 20 bp, synthetic construct
  source 1..20: mol_type = other DNA
cagggaaggaagcagccacc

SEQ ID NO: 276007 - DNA, 20 bp, synthetic construct
  source 1..20: mol_type = other DNA
acagggaaggaagcagccac

SEQ ID NO: 276008 - DNA, 20 bp, synthetic construct
  source 1..20: mol_type = other DNA
cacagggaaggaagcagcca

SEQ ID NO: 276009 - DNA, 20 bp, synthetic construct
  source 1..20: mol_type = other DNA
acacagggaaggaagcagcc

SEQ ID NO: 276010 - DNA, 20 bp, synthetic construct
  source 1..20: mol_type = other DNA
cacacagggaaggaagcagc

SEQ ID NO: 276011 - DNA, 20 bp, synthetic construct
  source 1..20: mol_type = other DNA
acacacagggaaggaagcag

SEQ ID NO: 276012 - DNA, 20 bp, synthetic construct
  source 1..20: mol_type = other DNA
tacacacagggaaggaagca

SEQ ID NO: 276013 - DNA, 20 bp, synthetic construct
  source 1..20: mol_type = other DNA
atacacacagggaaggaagc

SEQ ID NO: 276014 - DNA, 20 bp, synthetic construct
  source 1..20: mol_type = other DNA
aatacacacagggaaggaag

SEQ ID NO: 276015 - DNA, 20 bp, synthetic construct
  source 1..20: mol_type = other DNA
caatacacacagggaaggaa

SEQ ID NO: 276016 - DNA, 20 bp, synthetic construct
  source 1..20: mol_type = other DNA
tcaatacacacagggaagga

SEQ ID NO: 276017 - DNA, 20 bp, synthetic construct
  source 1..20: mol_type = other DNA
atcaatacacacagggaagg

SEQ ID NO: 276018 - DNA, 20 bp, synthetic construct
  source 1..20: mol_type = other DNA
aatcaatacacacagggaag

SEQ ID NO: 276019 - DNA, 20 bp, synthetic construct
  source 1..20: mol_type = other DNA
aaatcaatacacacagggaa

SEQ ID NO: 276020 - DNA, 20 bp, synthetic construct
  source 1..20: mol_type = other DNA
caaatcaatacacacaggga

SEQ ID NO: 276021 - DNA, 20 bp, synthetic construct
  source 1..20: mol_type = other DNA
acaaatcaatacacacaggg

SEQ ID NO: 276022 - DNA, 20 bp, synthetic construct
  source 1..20: mol_type = other DNA
aacaaatcaatacacacagg

SEQ ID NO: 276023 - DNA, 20 bp, synthetic construct
  source 1..20: mol_type = other DNA
aaacaaatcaatacacacag

SEQ ID NO: 276024 - DNA, 20 bp, synthetic construct
  source 1..20: mol_type = other DNA
gaaacaaatcaatacacaca

SEQ ID NO: 276025 - DNA, 20 bp, synthetic construct
  source 1..20: mol_type = other DNA
agaaacaaatcaatacacac

SEQ ID NO: 276026 - DNA, 20 bp, synthetic construct
  source 1..20: mol_type = other DNA
gagaaacaaatcaatacaca

SEQ ID NO: 276027 - DNA, 20 bp, synthetic construct
  source 1..20: mol_type = other DNA
agagaaacaaatcaatacac

SEQ ID NO: 276028 - DNA, 20 bp, synthetic construct
  source 1..20: mol_type = other DNA
aagagaaacaaatcaataca

SEQ ID NO: 276029 - DNA, 20 bp, synthetic construct
  source 1..20: mol_type = other DNA
aaagagaaacaaatcaatac

SEQ ID NO: 276030 - DNA, 20 bp, synthetic construct
  source 1..20: mol_type = other DNA
aaaagagaaacaaatcaata

SEQ ID NO: 276031 - DNA, 20 bp, synthetic construct
  source 1..20: mol_type = other DNA
aaaaagagaaacaaatcaat

SEQ ID NO: 276032 - DNA, 20 bp, synthetic construct
  source 1..20: mol_type = other DNA
aaaaaagagaaacaaatcaa

SEQ ID NO: 276033 - DNA, 20 bp, synthetic construct
  source 1..20: mol_type = other DNA
caaaaaagagaaacaaatca

SEQ ID NO: 276034 - DNA, 20 bp, synthetic construct
  source 1..20: mol_type = other DNA
tcaaaaaagagaaacaaatc

SEQ ID NO: 276035 - DNA, 20 bp, synthetic construct
  source 1..20: mol_type = other DNA
ctcaaaaaagagaaacaaat

SEQ ID NO: 276036 - DNA, 20 bp, synthetic construct
  source 1..20: mol_type = other DNA
tctcaaaaaagagaaacaaa

SEQ ID NO: 276037 - DNA, 20 bp, synthetic construct
  source 1..20: mol_type = other DNA
gtctcaaaaaagagaaacaa

SEQ ID NO: 276038 - DNA, 20 bp, synthetic construct
  source 1..20: mol_type = other DNA
tgtctcaaaaaagagaaaca

SEQ ID NO: 276039 - DNA, 20 bp, synthetic construct
  source 1..20: mol_type = other DNA
ctgtctcaaaaaagagaaac

SEQ ID NO: 276040 - DNA, 20 bp, synthetic construct
  source 1..20: mol_type = other DNA
tctgtctcaaaaaagagaaa

SEQ ID NO: 276041 - DNA, 20 bp, synthetic construct
  source 1..20: mol_type = other DNA
ctctgtctcaaaaaagagaa

SEQ ID NO: 276042 - DNA, 20 bp, synthetic construct
  source 1..20: mol_type = other DNA
actctgtctcaaaaaagaga

SEQ ID NO: 276043 - DNA, 20 bp, synthetic construct
  source 1..20: mol_type = other DNA
gactctgtctcaaaaaagag

SEQ ID NO: 276044 - DNA, 20 bp, synthetic construct
  source 1..20: mol_type = other DNA
agactctgtctcaaaaaaga

SEQ ID NO: 276045 - DNA, 20 bp, synthetic construct
  source 1..20: mol_type = other DNA
aagactctgtctcaaaaaag

SEQ ID NO: 276046 - DNA, 20 bp, synthetic construct
  source 1..20: mol_type = other DNA
caagactctgtctcaaaaaa

SEQ ID NO: 276047 - DNA, 20 bp, synthetic construct
  source 1..20: mol_type = other DNA
gcaagactctgtctcaaaaa

SEQ ID NO: 276048 - DNA, 20 bp, synthetic construct
  source 1..20: mol_type = other DNA
agcaagactctgtctcaaaa

SEQ ID NO: 276049 - DNA, 20 bp, synthetic construct
  source 1..20: mol_type = other DNA
cagcaagactctgtctcaaa

SEQ ID NO: 276050 - DNA, 20 bp, synthetic construct
  source 1..20: mol_type = other DNA
ccagcaagactctgtctcaa

SEQ ID NO: 276051 - DNA, 20 bp, synthetic construct
  source 1..20: mol_type = other DNA
cccagcaagactctgtctca

SEQ ID NO: 276052 - DNA, 20 bp, synthetic construct
  source 1..20: mol_type = other DNA
acccagcaagactctgtctc

SEQ ID NO: 276053 - DNA, 20 bp, synthetic construct
  source 1..20: mol_type = other DNA
aacccagcaagactctgtct

SEQ ID NO: 276054 - DNA, 20 bp, synthetic construct
  source 1..20: mol_type = other DNA
caacccagcaagactctgtc

SEQ ID NO: 276055 - DNA, 20 bp, synthetic construct
  source 1..20: mol_type = other DNA
gcaacccagcaagactctgt

SEQ ID NO: 276056 - DNA, 20 bp, synthetic construct
  source 1..20: mol_type = other DNA
ggcaacccagcaagactctg

SEQ ID NO: 276057 - DNA, 20 bp, synthetic construct
  source 1..20: mol_type = other DNA
gggcaacccagcaagactct

SEQ ID NO: 276058 - DNA, 20 bp, synthetic construct
  source 1..20: mol_type = other DNA
tgggcaacccagcaagactc

SEQ ID NO: 276059 - DNA, 20 bp, synthetic construct
  source 1..20: mol_type = other DNA
ctgggcaacccagcaagact

SEQ ID NO: 276060 - DNA, 20 bp, synthetic construct
  source 1..20: mol_type = other DNA
cctgggcaacccagcaagac

SEQ ID NO: 276061 - DNA, 20 bp, synthetic construct
  source 1..20: mol_type = other DNA
gcctgggcaacccagcaaga

SEQ ID NO: 276062 - DNA, 20 bp, synthetic construct
  source 1..20: mol_type = other DNA
agcctgggcaacccagcaag

SEQ ID NO: 276063 - DNA, 20 bp, synthetic construct
  source 1..20: mol_type = other DNA
cagcctgggcaacccagcaa

SEQ ID NO: 276064 - DNA, 20 bp, synthetic construct
  source 1..20: mol_type = other DNA
ccagcctgggcaacccagca

SEQ ID NO: 276065 - DNA, 20 bp, synthetic construct
  source 1..20: mol_type = other DNA
tccagcctgggcaacccagc

SEQ ID NO: 276066 - DNA, 20 bp, synthetic construct
  source 1..20: mol_type = other DNA
ctccagcctgggcaacccag

SEQ ID NO: 276067 - DNA, 20 bp, synthetic construct
  source 1..20: mol_type = other DNA
actccagcctgggcaaccca

SEQ ID NO: 276068 - DNA, 20 bp, synthetic construct
  source 1..20: mol_type = other DNA
cactccagcctgggcaaccc

SEQ ID NO: 276069 - DNA, 20 bp, synthetic construct
  source 1..20: mol_type = other DNA
gcactccagcctgggcaacc

SEQ ID NO: 276070 - DNA, 20 bp, synthetic construct
  source 1..20: mol_type = other DNA
tgcactccagcctgggcaac

SEQ ID NO: 276071 - DNA, 20 bp, synthetic construct
  source 1..20: mol_type = other DNA
ctgcactccagcctgggcaa

SEQ ID NO: 276072 - DNA, 20 bp, synthetic construct
  source 1..20: mol_type = other DNA
actgcactccagcctgggca

SEQ ID NO: 276073 - DNA, 20 bp, synthetic construct
  source 1..20: mol_type = other DNA
cactgcactccagcctgggc

SEQ ID NO: 276074 - DNA, 20 bp, synthetic construct
  source 1..20: mol_type = other DNA
ccactgcactccagcctggg

SEQ ID NO: 276075 - DNA, 20 bp, synthetic construct
  source 1..20: mol_type = other DNA
accactgcactccagcctgg

SEQ ID NO: 276076 - DNA, 20 bp, synthetic construct
  source 1..20: mol_type = other DNA
caccactgcactccagcctg

SEQ ID NO: 276077 - DNA, 20 bp, synthetic construct
  source 1..20: mol_type = other DNA
gcaccactgcactccagcct

SEQ ID NO: 276078 - DNA, 20 bp, synthetic construct
  source 1..20: mol_type = other DNA
cgcaccactgcactccagcc

SEQ ID NO: 276079 - DNA, 20 bp, synthetic construct
  source 1..20: mol_type = other DNA
tcgcaccactgcactccagc

SEQ ID NO: 276080 - DNA, 20 bp, synthetic construct
  source 1..20: mol_type = other DNA
atcgcaccactgcactccag

SEQ ID NO: 276081 - DNA, 20 bp, synthetic construct
  source 1..20: mol_type = other DNA
gatcgcaccactgcactcca

SEQ ID NO: 276082 - DNA, 20 bp, synthetic construct
  source 1..20: mol_type = other DNA
tgatcgcaccactgcactcc

SEQ ID NO: 276083 - DNA, 20 bp, synthetic construct
  source 1..20: mol_type = other DNA
atgatcgcaccactgcactc

SEQ ID NO: 276084 - DNA, 20 bp, synthetic construct
  source 1..20: mol_type = other DNA
tatgatcgcaccactgcact

SEQ ID NO: 276085 - DNA, 20 bp, synthetic construct
  source 1..20: mol_type = other DNA
ctatgatcgcaccactgcac

SEQ ID NO: 276086 - DNA, 20 bp, synthetic construct
  source 1..20: mol_type = other DNA
gctatgatcgcaccactgca

SEQ ID NO: 276087 - DNA, 20 bp, synthetic construct
  source 1..20: mol_type = other DNA
agctatgatcgcaccactgc

SEQ ID NO: 276088 - DNA, 20 bp, synthetic construct
  source 1..20: mol_type = other DNA
gagctatgatcgcaccactg

SEQ ID NO: 276089 - DNA, 20 bp, synthetic construct
  source 1..20: mol_type = other DNA
tgagctatgatcgcaccact

SEQ ID NO: 276090 - DNA, 20 bp, synthetic construct
  source 1..20: mol_type = other DNA
gtgagctatgatcgcaccac

SEQ ID NO: 276091 - DNA, 20 bp, synthetic construct
  source 1..20: mol_type = other DNA
agtgagctatgatcgcacca

SEQ ID NO: 276092 - DNA, 20 bp, synthetic construct
  source 1..20: mol_type = other DNA
cagtgagctatgatcgcacc

SEQ ID NO: 276093 - DNA, 20 bp, synthetic construct
  source 1..20: mol_type = other DNA
gcagtgagctatgatcgcac

SEQ ID NO: 276094 - DNA, 20 bp, synthetic construct
  source 1..20: mol_type = other DNA
tgcagtgagctatgatcgca

SEQ ID NO: 276095 - DNA, 20 bp, synthetic construct
  source 1..20: mol_type = other DNA
ctgcagtgagctatgatcgc

SEQ ID NO: 276096 - DNA, 20 bp, synthetic construct
  source 1..20: mol_type = other DNA
gctgcagtgagctatgatcg

SEQ ID NO: 276097 - DNA, 20 bp, synthetic construct
  source 1..20: mol_type = other DNA
ggctgcagtgagctatgatc

SEQ ID NO: 276098 - DNA, 20 bp, synthetic construct
  source 1..20: mol_type = other DNA
aggctgcagtgagctatgat

SEQ ID NO: 276099 - DNA, 20 bp, synthetic construct
  source 1..20: mol_type = other DNA
aaggctgcagtgagctatga

SEQ ID NO: 276100 - DNA, 20 bp, synthetic construct
  source 1..20: mol_type = other DNA
caaggctgcagtgagctatg

SEQ ID NO: 276101 - DNA, 20 bp, synthetic construct
  source 1..20: mol_type = other DNA
tcaaggctgcagtgagctat

SEQ ID NO: 276102 - DNA, 20 bp, synthetic construct
  source 1..20: mol_type = other DNA
ttcaaggctgcagtgagcta

SEQ ID NO: 276103 - DNA, 20 bp, synthetic construct
  source 1..20: mol_type = other DNA
cttcaaggctgcagtgagct

SEQ ID NO: 276104 - DNA, 20 bp, synthetic construct
  source 1..20: mol_type = other DNA
acttcaaggctgcagtgagc

SEQ ID NO: 276105 - DNA, 20 bp, synthetic construct
  source 1..20: mol_type = other DNA
gacttcaaggctgcagtgag

SEQ ID NO: 276106 - DNA, 20 bp, synthetic construct
  source 1..20: mol_type = other DNA
ggacttcaaggctgcagtga

SEQ ID NO: 276107 - DNA, 20 bp, synthetic construct
  source 1..20: mol_type = other DNA
aggacttcaaggctgcagtg

SEQ ID NO: 276108 - DNA, 20 bp, synthetic construct
  source 1..20: mol_type = other DNA
caggacttcaaggctgcagt

SEQ ID NO: 276109 - DNA, 20 bp, synthetic construct
  source 1..20: mol_type = other DNA
tcaggacttcaaggctgcag

SEQ ID NO: 276110 - DNA, 20 bp, synthetic construct
  source 1..20: mol_type = other DNA
ctcaggacttcaaggctgca

SEQ ID NO: 276111 - DNA, 20 bp, synthetic construct
  source 1..20: mol_type = other DNA
gctcaggacttcaaggctgc

SEQ ID NO: 276112 - DNA, 20 bp, synthetic construct
  source 1..20: mol_type = other DNA
agctcaggacttcaaggctg

SEQ ID NO: 276113 - DNA, 20 bp, synthetic construct
  source 1..20: mol_type = other DNA
gagctcaggacttcaaggct

SEQ ID NO: 276114 - DNA, 20 bp, synthetic construct
  source 1..20: mol_type = other DNA
tgagctcaggacttcaaggc

SEQ ID NO: 276115 - DNA, 20 bp, synthetic construct
  source 1..20: mol_type = other DNA
ttgagctcaggacttcaagg

SEQ ID NO: 276116 - DNA, 20 bp, synthetic construct
  source 1..20: mol_type = other DNA
cttgagctcaggacttcaag

SEQ ID NO: 276117 - DNA, 20 bp, synthetic construct
  source 1..20: mol_type = other DNA
tcttgagctcaggacttcaa

SEQ ID NO: 276118 - DNA, 20 bp, synthetic construct
  source 1..20: mol_type = other DNA
ctcttgagctcaggacttca

SEQ ID NO: 276119 - DNA, 20 bp, synthetic construct
  source 1..20: mol_type = other DNA
tctcttgagctcaggacttc

SEQ ID NO: 276120 - DNA, 20 bp, synthetic construct
  source 1..20: mol_type = other DNA
atctcttgagctcaggactt

SEQ ID NO: 276121 - DNA, 20 bp, synthetic construct
  source 1..20: mol_type = other DNA
gatctcttgagctcaggact

SEQ ID NO: 276122 - DNA, 20 bp, synthetic construct
  source 1..20: mol_type = other DNA
ggatctcttgagctcaggac

SEQ ID NO: 276123 - DNA, 20 bp, synthetic construct
  source 1..20: mol_type = other DNA
aggatctcttgagctcagga

SEQ ID NO: 276124 - DNA, 20 bp, synthetic construct
  source 1..20: mol_type = other DNA
aaggatctcttgagctcagg

SEQ ID NO: 276125 - DNA, 20 bp, synthetic construct
  source 1..20: mol_type = other DNA
gaaggatctcttgagctcag

SEQ ID NO: 276126 - DNA, 20 bp, synthetic construct
  source 1..20: mol_type = other DNA
ggaaggatctcttgagctca

SEQ ID NO: 276127 - DNA, 20 bp, synthetic construct
  source 1..20: mol_type = other DNA
tggaaggatctcttgagctc

SEQ ID NO: 276128 - DNA, 20 bp, synthetic construct
  source 1..20: mol_type = other DNA
gtggaaggatctcttgagct

SEQ ID NO: 276129 - DNA, 20 bp, synthetic construct
  source 1..20: mol_type = other DNA
ggtggaaggatctcttgagc

SEQ ID NO: 276130 - DNA, 20 bp, synthetic construct
  source 1..20: mol_type = other DNA
aggtggaaggatctcttgag

SEQ ID NO: 276131 - DNA, 20 bp, synthetic construct
  source 1..20: mol_type = other DNA
gaggtggaaggatctcttga

SEQ ID NO: 276132 - DNA, 20 bp, synthetic construct
  source 1..20: mol_type = other DNA
tgaggtggaaggatctcttg

SEQ ID NO: 276133 - DNA, 20 bp, synthetic construct
  source 1..20: mol_type = other DNA
ctgaggtggaaggatctctt

SEQ ID NO: 276134 - DNA, 20 bp, synthetic construct
  source 1..20: mol_type = other DNA
gctgaggtggaaggatctct

SEQ ID NO: 276135 - DNA, 20 bp, synthetic construct
  source 1..20: mol_type = other DNA
ggctgaggtggaaggatctc

SEQ ID NO: 276136 - DNA, 20 bp, synthetic construct
  source 1..20: mol_type = other DNA
aggctgaggtggaaggatct

SEQ ID NO: 276137 - DNA, 20 bp, synthetic construct
  source 1..20: mol_type = other DNA
gaggctgaggtggaaggatc

SEQ ID NO: 276138 - DNA, 20 bp, synthetic construct
  source 1..20: mol_type = other DNA
ggaggctgaggtggaaggat

SEQ ID NO: 276139 - DNA, 20 bp, synthetic construct
  source 1..20: mol_type = other DNA
aggaggctgaggtggaagga

SEQ ID NO: 276140 - DNA, 20 bp, synthetic construct
  source 1..20: mol_type = other DNA
caggaggctgaggtggaagg

SEQ ID NO: 276141 - DNA, 20 bp, synthetic construct
  source 1..20: mol_type = other DNA
tcaggaggctgaggtggaag

SEQ ID NO: 276142 - DNA, 20 bp, synthetic construct
  source 1..20: mol_type = other DNA
ctcaggaggctgaggtggaa

SEQ ID NO: 276143 - DNA, 20 bp, synthetic construct
  source 1..20: mol_type = other DNA
actcaggaggctgaggtgga

SEQ ID NO: 276144 - DNA, 20 bp, synthetic construct
  source 1..20: mol_type = other DNA
tactcaggaggctgaggtgg

SEQ ID NO: 276145 - DNA, 20 bp, synthetic construct
  source 1..20: mol_type = other DNA
ctactcaggaggctgaggtg

SEQ ID NO: 276146 - DNA, 20 bp, synthetic construct
  source 1..20: mol_type = other DNA
actactcaggaggctgaggt

SEQ ID NO: 276147 - DNA, 20 bp, synthetic construct
  source 1..20: mol_type = other DNA
aactactcaggaggctgagg

SEQ ID NO: 276148 - DNA, 20 bp, synthetic construct
  source 1..20: mol_type = other DNA
caactactcaggaggctgag

SEQ ID NO: 276149 - DNA, 20 bp, synthetic construct
  source 1..20: mol_type = other DNA
ccaactactcaggaggctga

SEQ ID NO: 276150 - DNA, 20 bp, synthetic construct
  source 1..20: mol_type = other DNA
cccaactactcaggaggctg

SEQ ID NO: 276151 - DNA, 20 bp, synthetic construct
  source 1..20: mol_type = other DNA
tcccaactactcaggaggct

SEQ ID NO: 276152 - DNA, 20 bp, synthetic construct
  source 1..20: mol_type = other DNA
gtcccaactactcaggaggc

SEQ ID NO: 276153 - DNA, 20 bp, synthetic construct
  source 1..20: mol_type = other DNA
ggtcccaactactcaggagg

SEQ ID NO: 276154 - DNA, 20 bp, synthetic construct
  source 1..20: mol_type = other DNA
tggtcccaactactcaggag

SEQ ID NO: 276155 - DNA, 20 bp, synthetic construct
  source 1..20: mol_type = other DNA
gtggtcccaactactcagga

SEQ ID NO: 276156 - DNA, 20 bp, synthetic construct
  source 1..20: mol_type = other DNA
tgtggtcccaactactcagg

SEQ ID NO: 276157 - DNA, 20 bp, synthetic construct
  source 1..20: mol_type = other DNA
ctgtggtcccaactactcag

SEQ ID NO: 276158 - DNA, 20 bp, synthetic construct
  source 1..20: mol_type = other DNA
cctgtggtcccaactactca

SEQ ID NO: 276159 - DNA, 20 bp, synthetic construct
  source 1..20: mol_type = other DNA
gcctgtggtcccaactactc

SEQ ID NO: 276160 - DNA, 20 bp, synthetic construct
  source 1..20: mol_type = other DNA
agcctgtggtcccaactact

SEQ ID NO: 276161 - DNA, 20 bp, synthetic construct
  source 1..20: mol_type = other DNA
aagcctgtggtcccaactac

SEQ ID NO: 276162 - DNA, 20 bp, synthetic construct
  source 1..20: mol_type = other DNA
caagcctgtggtcccaacta

SEQ ID NO: 276163 - DNA, 20 bp, synthetic construct
  source 1..20: mol_type = other DNA
gcaagcctgtggtcccaact

SEQ ID NO: 276164 - DNA, 20 bp, synthetic construct
  source 1..20: mol_type = other DNA
tgcaagcctgtggtcccaac

SEQ ID NO: 276165 - DNA, 20 bp, synthetic construct
  source 1..20: mol_type = other DNA
gtgcaagcctgtggtcccaa

SEQ ID NO: 276166 - DNA, 20 bp, synthetic construct
  source 1..20: mol_type = other DNA
ggtgcaagcctgtggtccca

SEQ ID NO: 276167 - DNA, 20 bp, synthetic construct
  source 1..20: mol_type = other DNA
tggtgcaagcctgtggtccc

SEQ ID NO: 276168 - DNA, 20 bp, synthetic construct
  source 1..20: mol_type = other DNA
gtggtgcaagcctgtggtcc

SEQ ID NO: 276169 - DNA, 20 bp, synthetic construct
  source 1..20: mol_type = other DNA
tgtggtgcaagcctgtggtc

SEQ ID NO: 276170 - DNA, 20 bp, synthetic construct
  source 1..20: mol_type = other DNA
ctgtggtgcaagcctgtggt

SEQ ID NO: 276171 - DNA, 20 bp, synthetic construct
  source 1..20: mol_type = other DNA
actgtggtgcaagcctgtgg

SEQ ID NO: 276172 - DNA, 20 bp, synthetic construct
  source 1..20: mol_type = other DNA
cactgtggtgcaagcctgtg

SEQ ID NO: 276173 - DNA, 20 bp, synthetic construct
  source 1..20: mol_type = other DNA
gcactgtggtgcaagcctgt

SEQ ID NO: 276174 - DNA, 20 bp, synthetic construct
  source 1..20: mol_type = other DNA
ggcactgtggtgcaagcctg

SEQ ID NO: 276175 - DNA, 20 bp, synthetic construct
  source 1..20: mol_type = other DNA
gggcactgtggtgcaagcct

SEQ ID NO: 276176 - DNA, 20 bp, synthetic construct
  source 1..20: mol_type = other DNA
tgggcactgtggtgcaagcc

SEQ ID NO: 276177 - DNA, 20 bp, synthetic construct
  source 1..20: mol_type = other DNA
ttgggcactgtggtgcaagc

SEQ ID NO: 276178 - DNA, 20 bp, synthetic construct
  source 1..20: mol_type = other DNA
gttgggcactgtggtgcaag

SEQ ID NO: 276179 - DNA, 20 bp, synthetic construct
  source 1..20: mol_type = other DNA
agttgggcactgtggtgcaa

SEQ ID NO: 276180 - DNA, 20 bp, synthetic construct
  source 1..20: mol_type = other DNA
tagttgggcactgtggtgca

SEQ ID NO: 276181 - DNA, 20 bp, synthetic construct
  source 1..20: mol_type = other DNA
ttagttgggcactgtggtgc

SEQ ID NO: 276182 - DNA, 20 bp, synthetic construct
  source 1..20: mol_type = other DNA
attagttgggcactgtggtg

SEQ ID NO: 276183 - DNA, 20 bp, synthetic construct
  source 1..20: mol_type = other DNA
aattagttgggcactgtggt

SEQ ID NO: 276184 - DNA, 20 bp, synthetic construct
  source 1..20: mol_type = other DNA
aaattagttgggcactgtgg

SEQ ID NO: 276185 - DNA, 20 bp, synthetic construct
  source 1..20: mol_type = other DNA
gaaattagttgggcactgtg

SEQ ID NO: 276186 - DNA, 20 bp, synthetic construct
  source 1..20: mol_type = other DNA
agaaattagttgggcactgt

SEQ ID NO: 276187 - DNA, 20 bp, synthetic construct
  source 1..20: mol_type = other DNA
aagaaattagttgggcactg

SEQ ID NO: 276188 - DNA, 20 bp, synthetic construct
  source 1..20: mol_type = other DNA
taagaaattagttgggcact

SEQ ID NO: 276189 - DNA, 20 bp, synthetic construct
  source 1..20: mol_type = other DNA
ataagaaattagttgggcac

SEQ ID NO: 276190 - DNA, 20 bp, synthetic construct
  source 1..20: mol_type = other DNA
tataagaaattagttgggca

SEQ ID NO: 276191 - DNA, 20 bp, synthetic construct
  source 1..20: mol_type = other DNA
atataagaaattagttgggc

SEQ ID NO: 276192 - DNA, 20 bp, synthetic construct
  source 1..20: mol_type = other DNA
aatataagaaattagttggg

SEQ ID NO: 276193 - DNA, 20 bp, synthetic construct
  source 1..20: mol_type = other DNA
aaatataagaaattagttgg

SEQ ID NO: 276194 - DNA, 20 bp, synthetic construct
  source 1..20: mol_type = other DNA
aaaatataagaaattagttg

SEQ ID NO: 276195 - DNA, 20 bp, synthetic construct
  source 1..20: mol_type = other DNA
aaaaatataagaaattagtt

SEQ ID NO: 276196 - DNA, 20 bp, synthetic construct
  source 1..20: mol_type = other DNA
aaaaaatataagaaattagt

SEQ ID NO: 276197 - DNA, 20 bp, synthetic construct
  source 1..20: mol_type = other DNA
caaaaaatataagaaattag

SEQ ID NO: 276198 - DNA, 20 bp, synthetic construct
  source 1..20: mol_type = other DNA
acaaaaaatataagaaatta

SEQ ID NO: 276199 - DNA, 20 bp, synthetic construct
  source 1..20: mol_type = other DNA
tacaaaaaatataagaaatt

SEQ ID NO: 276200 - DNA, 20 bp, synthetic construct
  source 1..20: mol_type = other DNA
ctacaaaaaatataagaaat

SEQ ID NO: 276201 - DNA, 20 bp, synthetic construct
  source 1..20: mol_type = other DNA
tctacaaaaaatataagaaa

SEQ ID NO: 276202 - DNA, 20 bp, synthetic construct
  source 1..20: mol_type = other DNA
ctctacaaaaaatataagaa

SEQ ID NO: 276203 - DNA, 20 bp, synthetic construct
  source 1..20: mol_type = other DNA
tctctacaaaaaatataaga

SEQ ID NO: 276204 - DNA, 20 bp, synthetic construct
  source 1..20: mol_type = other DNA
atctctacaaaaaatataag

SEQ ID NO: 276205 - DNA, 20 bp, synthetic construct
  source 1..20: mol_type = other DNA
catctctacaaaaaatataa

SEQ ID NO: 276206 - DNA, 20 bp, synthetic construct
  source 1..20: mol_type = other DNA
ccatctctacaaaaaatata

SEQ ID NO: 276207 - DNA, 20 bp, synthetic construct
  source 1..20: mol_type = other DNA
cccatctctacaaaaaatat

SEQ ID NO: 276208 - DNA, 20 bp, synthetic construct
  source 1..20: mol_type = other DNA
ccccatctctacaaaaaata

SEQ ID NO: 276209 - DNA, 20 bp, synthetic construct
  source 1..20: mol_type = other DNA
accccatctctacaaaaaat

SEQ ID NO: 276210 - DNA, 20 bp, synthetic construct
  source 1..20: mol_type = other DNA
aaccccatctctacaaaaaa

SEQ ID NO: 276211 - DNA, 20 bp, synthetic construct
  source 1..20: mol_type = other DNA
aaaccccatctctacaaaaa

SEQ ID NO: 276212 - DNA, 20 bp, synthetic construct
  source 1..20: mol_type = other DNA
gaaaccccatctctacaaaa

SEQ ID NO: 276213 - DNA, 20 bp, synthetic construct
  source 1..20: mol_type = other DNA
tgaaaccccatctctacaaa

SEQ ID NO: 276214 - DNA, 20 bp, synthetic construct
  source 1..20: mol_type = other DNA
gtgaaaccccatctctacaa

SEQ ID NO: 276215 - DNA, 20 bp, synthetic construct
  source 1..20: mol_type = other DNA
agtgaaaccccatctctaca

SEQ ID NO: 276216 - DNA, 20 bp, synthetic construct
  source 1..20: mol_type = other DNA
cagtgaaaccccatctctac

SEQ ID NO: 276217 - DNA, 20 bp, synthetic construct
  source 1..20: mol_type = other DNA
acagtgaaaccccatctcta

SEQ ID NO: 276218 - DNA, 20 bp, synthetic construct
  source 1..20: mol_type = other DNA
cacagtgaaaccccatctct

SEQ ID NO: 276219 - DNA, 20 bp, synthetic construct
  source 1..20: mol_type = other DNA
acacagtgaaaccccatctc

SEQ ID NO: 276220 - DNA, 20 bp, synthetic construct
  source 1..20: mol_type = other DNA
gacacagtgaaaccccatct

SEQ ID NO: 276221 - DNA, 20 bp, synthetic construct
  source 1..20: mol_type = other DNA
cgacacagtgaaaccccatc

SEQ ID NO: 276222 - DNA, 20 bp, synthetic construct
  source 1..20: mol_type = other DNA
gcgacacagtgaaaccccat

SEQ ID NO: 276223 - DNA, 20 bp, synthetic construct
  source 1..20: mol_type = other DNA
ggcgacacagtgaaacccca

SEQ ID NO: 276224 - DNA, 20 bp, synthetic construct
  source 1..20: mol_type = other DNA
gggcgacacagtgaaacccc

SEQ ID NO: 276225 - DNA, 20 bp, synthetic construct
  source 1..20: mol_type = other DNA
tgggcgacacagtgaaaccc

SEQ ID NO: 276226 - DNA, 20 bp, synthetic construct
  source 1..20: mol_type = other DNA
ctgggcgacacagtgaaacc

SEQ ID NO: 276227 - DNA, 20 bp, synthetic construct
  source 1..20: mol_type = other DNA
cctgggcgacacagtgaaac

SEQ ID NO: 276228 - DNA, 20 bp, synthetic construct
  source 1..20: mol_type = other DNA
tcctgggcgacacagtgaaa

SEQ ID NO: 276229 - DNA, 20 bp, synthetic construct
  source 1..20: mol_type = other DNA
atcctgggcgacacagtgaa

SEQ ID NO: 276230 - DNA, 20 bp, synthetic construct
  source 1..20: mol_type = other DNA
catcctgggcgacacagtga

SEQ ID NO: 276231 - DNA, 20 bp, synthetic construct
  source 1..20: mol_type = other DNA
ccatcctgggcgacacagtg

SEQ ID NO: 276232 - DNA, 20 bp, synthetic construct
  source 1..20: mol_type = other DNA
accatcctgggcgacacagt

SEQ ID NO: 276233 - DNA, 20 bp, synthetic construct
  source 1..20: mol_type = other DNA
gaccatcctgggcgacacag

SEQ ID NO: 276234 - DNA, 20 bp, synthetic construct
  source 1..20: mol_type = other DNA
agaccatcctgggcgacaca

SEQ ID NO: 276235 - DNA, 20 bp, synthetic construct
  source 1..20: mol_type = other DNA
aagaccatcctgggcgacac

SEQ ID NO: 276236 - DNA, 20 bp, synthetic construct
  source 1..20: mol_type = other DNA
caagaccatcctgggcgaca

SEQ ID NO: 276237 - DNA, 20 bp, synthetic construct
  source 1..20: mol_type = other DNA
tcaagaccatcctgggcgac

SEQ ID NO: 276238 - DNA, 20 bp, synthetic construct
  source 1..20: mol_type = other DNA
ttcaagaccatcctgggcga

SEQ ID NO: 276239 - DNA, 20 bp, synthetic construct
  source 1..20: mol_type = other DNA
gttcaagaccatcctgggcg

SEQ ID NO: 276240 - DNA, 20 bp, synthetic construct
  source 1..20: mol_type = other DNA
agttcaagaccatcctgggc

SEQ ID NO: 276241 - DNA, 20 bp, synthetic construct
  source 1..20: mol_type = other DNA
gagttcaagaccatcctggg

SEQ ID NO: 276242 - DNA, 20 bp, synthetic construct
  source 1..20: mol_type = other DNA
ggagttcaagaccatcctgg

SEQ ID NO: 276243 - DNA, 20 bp, synthetic construct
  source 1..20: mol_type = other DNA
aggagttcaagaccatcctg

SEQ ID NO: 276244 - DNA, 20 bp, synthetic construct
  source 1..20: mol_type = other DNA
caggagttcaagaccatcct

SEQ ID NO: 276245 - DNA, 20 bp, synthetic construct
  source 1..20: mol_type = other DNA
ccaggagttcaagaccatcc

SEQ ID NO: 276246 - DNA, 20 bp, synthetic construct
  source 1..20: mol_type = other DNA
cccaggagttcaagaccatc

SEQ ID NO: 276247 - DNA, 20 bp, synthetic construct
  source 1..20: mol_type = other DNA
gcccaggagttcaagaccat

SEQ ID NO: 276248 - DNA, 20 bp, synthetic construct
  source 1..20: mol_type = other DNA
agcccaggagttcaagacca

SEQ ID NO: 276249 - DNA, 20 bp, synthetic construct
  source 1..20: mol_type = other DNA
gagcccaggagttcaagacc

SEQ ID NO: 276250 - DNA, 20 bp, synthetic construct
  source 1..20: mol_type = other DNA
tgagcccaggagttcaagac

SEQ ID NO: 276251 - DNA, 20 bp, synthetic construct
  source 1..20: mol_type = other DNA
ttgagcccaggagttcaaga

SEQ ID NO: 276252 - DNA, 20 bp, synthetic construct
  source 1..20: mol_type = other DNA
cttgagcccaggagttcaag

SEQ ID NO: 276253 - DNA, 20 bp, synthetic construct
  source 1..20: mol_type = other DNA
acttgagcccaggagttcaa

SEQ ID NO: 276254 - DNA, 20 bp, synthetic construct
  source 1..20: mol_type = other DNA
cacttgagcccaggagttca

SEQ ID NO: 276255 - DNA, 20 bp, synthetic construct
  source 1..20: mol_type = other DNA
tcacttgagcccaggagttc

SEQ ID NO: 276256 - DNA, 20 bp, synthetic construct
  source 1..20: mol_type = other DNA
atcacttgagcccaggagtt

SEQ ID NO: 276257 - DNA, 20 bp, synthetic construct
  source 1..20: mol_type = other DNA
gatcacttgagcccaggagt

SEQ ID NO: 276258 - DNA, 20 bp, synthetic construct
  source 1..20: mol_type = other DNA
ggatcacttgagcccaggag

SEQ ID NO: 276259 - DNA, 20 bp, synthetic construct
  source 1..20: mol_type = other DNA
aggatcacttgagcccagga

SEQ ID NO: 276260 - DNA, 20 bp, synthetic construct
  source 1..20: mol_type = other DNA
gaggatcacttgagcccagg

SEQ ID NO: 276261 - DNA, 20 bp, synthetic construct
  source 1..20: mol_type = other DNA
ggaggatcacttgagcccag

SEQ ID NO: 276262 - DNA, 20 bp, synthetic construct
  source 1..20: mol_type = other DNA
aggaggatcacttgagccca

SEQ ID NO: 276263 - DNA, 20 bp, synthetic construct
  source 1..20: mol_type = other DNA
caggaggatcacttgagccc

SEQ ID NO: 276264 - DNA, 20 bp, synthetic construct
  source 1..20: mol_type = other DNA
gcaggaggatcacttgagcc

SEQ ID NO: 276265 - DNA, 20 bp, synthetic construct
  source 1..20: mol_type = other DNA
ggcaggaggatcacttgagc

SEQ ID NO: 276266 - DNA, 20 bp, synthetic construct
  source 1..20: mol_type = other DNA
aggcaggaggatcacttgag

SEQ ID NO: 276267 - DNA, 20 bp, synthetic construct
  source 1..20: mol_type = other DNA
gaggcaggaggatcacttga

SEQ ID NO: 276268 - DNA, 20 bp, synthetic construct
  source 1..20: mol_type = other DNA
tgaggcaggaggatcacttg

SEQ ID NO: 276269 - DNA, 20 bp, synthetic construct
  source 1..20: mol_type = other DNA
ctgaggcaggaggatcactt

SEQ ID NO: 276270 - DNA, 20 bp, synthetic construct
  source 1..20: mol_type = other DNA
gctgaggcaggaggatcact

SEQ ID NO: 276271 - DNA, 20 bp, synthetic construct
  source 1..20: mol_type = other DNA
ggctgaggcaggaggatcac

SEQ ID NO: 276272 - DNA, 20 bp, synthetic construct
  source 1..20: mol_type = other DNA
aggctgaggcaggaggatca

SEQ ID NO: 276273 - DNA, 20 bp, synthetic construct
  source 1..20: mol_type = other DNA
gaggctgaggcaggaggatc

SEQ ID NO: 276274 - DNA, 20 bp, synthetic construct
  source 1..20: mol_type = other DNA
cgaggctgaggcaggaggat

SEQ ID NO: 276275 - DNA, 20 bp, synthetic construct
  source 1..20: mol_type = other DNA
gcgaggctgaggcaggagga

SEQ ID NO: 276276 - DNA, 20 bp, synthetic construct
  source 1..20: mol_type = other DNA
tgcgaggctgaggcaggagg

SEQ ID NO: 276277 - DNA, 20 bp, synthetic construct
  source 1..20: mol_type = other DNA
ttgcgaggctgaggcaggag

SEQ ID NO: 276278 - DNA, 20 bp, synthetic construct
  source 1..20: mol_type = other DNA
tttgcgaggctgaggcagga

SEQ ID NO: 276279 - DNA, 20 bp, synthetic construct
  source 1..20: mol_type = other DNA
atttgcgaggctgaggcagg

SEQ ID NO: 276280 - DNA, 20 bp, synthetic construct
  source 1..20: mol_type = other DNA
aatttgcgaggctgaggcag

SEQ ID NO: 276281 - DNA, 20 bp, synthetic construct
  source 1..20: mol_type = other DNA
caatttgcgaggctgaggca

SEQ ID NO: 276282 - DNA, 20 bp, synthetic construct
  source 1..20: mol_type = other DNA
gcaatttgcgaggctgaggc

SEQ ID NO: 276283 - DNA, 20 bp, synthetic construct
  source 1..20: mol_type = other DNA
agcaatttgcgaggctgagg

SEQ ID NO: 276284 - DNA, 20 bp, synthetic construct
  source 1..20: mol_type = other DNA
cagcaatttgcgaggctgag

SEQ ID NO: 276285 - DNA, 20 bp, synthetic construct
  source 1..20: mol_type = other DNA
ccagcaatttgcgaggctga

SEQ ID NO: 276286 - DNA, 20 bp, synthetic construct
  source 1..20: mol_type = other DNA
cccagcaatttgcgaggctg

SEQ ID NO: 276287 - DNA, 20 bp, synthetic construct
  source 1..20: mol_type = other DNA
tcccagcaatttgcgaggct

SEQ ID NO: 276288 - DNA, 20 bp, synthetic construct
  source 1..20: mol_type = other DNA
atcccagcaatttgcgaggc

SEQ ID NO: 276289 - DNA, 20 bp, synthetic construct
  source 1..20: mol_type = other DNA
aatcccagcaatttgcgagg

SEQ ID NO: 276290 - DNA, 20 bp, synthetic construct
  source 1..20: mol_type = other DNA
taatcccagcaatttgcgag

SEQ ID NO: 276291 - DNA, 20 bp, synthetic construct
  source 1..20: mol_type = other DNA
gtaatcccagcaatttgcga

SEQ ID NO: 276292 - DNA, 20 bp, synthetic construct
  source 1..20: mol_type = other DNA
tgtaatcccagcaatttgcg

SEQ ID NO: 276293 - DNA, 20 bp, synthetic construct
  source 1..20: mol_type = other DNA
ctgtaatcccagcaatttgc

SEQ ID NO: 276294 - DNA, 20 bp, synthetic construct
  source 1..20: mol_type = other DNA
cctgtaatcccagcaatttg

SEQ ID NO: 276295 - DNA, 20 bp, synthetic construct
  source 1..20: mol_type = other DNA
acctgtaatcccagcaattt

SEQ ID NO: 276296 - DNA, 20 bp, synthetic construct
  source 1..20: mol_type = other DNA
cacctgtaatcccagcaatt

SEQ ID NO: 276297 - DNA, 20 bp, synthetic construct
  source 1..20: mol_type = other DNA
acacctgtaatcccagcaat

SEQ ID NO: 276298 - DNA, 20 bp, synthetic construct
  source 1..20: mol_type = other DNA
cacacctgtaatcccagcaa

SEQ ID NO: 276299 - DNA, 20 bp, synthetic construct
  source 1..20: mol_type = other DNA
tcacacctgtaatcccagca

SEQ ID NO: 276300 - DNA, 20 bp, synthetic construct
  source 1..20: mol_type = other DNA
ctcacacctgtaatcccagc

SEQ ID NO: 276301 - DNA, 20 bp, synthetic construct
  source 1..20: mol_type = other DNA
gctcacacctgtaatcccag

SEQ ID NO: 276302 - DNA, 20 bp, synthetic construct
  source 1..20: mol_type = other DNA
ggctcacacctgtaatccca

SEQ ID NO: 276303 - DNA, 20 bp, synthetic construct
  source 1..20: mol_type = other DNA
tggctcacacctgtaatccc

SEQ ID NO: 276304 - DNA, 20 bp, synthetic construct
  source 1..20: mol_type = other DNA
gtggctcacacctgtaatcc

SEQ ID NO: 276305 - DNA, 20 bp, synthetic construct
  source 1..20: mol_type = other DNA
ggtggctcacacctgtaatc

SEQ ID NO: 276306 - DNA, 20 bp, synthetic construct
  source 1..20: mol_type = other DNA
tggtggctcacacctgtaat

SEQ ID NO: 276307 - DNA, 20 bp, synthetic construct
  source 1..20: mol_type = other DNA
atggtggctcacacctgtaa

SEQ ID NO: 276308 - DNA, 20 bp, synthetic construct
  source 1..20: mol_type = other DNA
catggtggctcacacctgta

SEQ ID NO: 276309 - DNA, 20 bp, synthetic construct
  source 1..20: mol_type = other DNA
gcatggtggctcacacctgt

SEQ ID NO: 276310 - DNA, 20 bp, synthetic construct
  source 1..20: mol_type = other DNA
ggcatggtggctcacacctg

SEQ ID NO: 276311 - DNA, 20 bp, synthetic construct
  source 1..20: mol_type = other DNA
gggcatggtggctcacacct

SEQ ID NO: 276312 - DNA, 20 bp, synthetic construct
  source 1..20: mol_type = other DNA
cgggcatggtggctcacacc

SEQ ID NO: 276313 - DNA, 20 bp, synthetic construct
  source 1..20: mol_type = other DNA
tcgggcatggtggctcacac

SEQ ID NO: 276314 - DNA, 20 bp, synthetic construct
  source 1..20: mol_type = other DNA
gtcgggcatggtggctcaca

SEQ ID NO: 276315 - DNA, 20 bp, synthetic construct
  source 1..20: mol_type = other DNA
ggtcgggcatggtggctcac

SEQ ID NO: 276316 - DNA, 20 bp, synthetic construct
  source 1..20: mol_type = other DNA
aggtcgggcatggtggctca

SEQ ID NO: 276317 - DNA, 20 bp, synthetic construct
  source 1..20: mol_type = other DNA
aaggtcgggcatggtggctc

SEQ ID NO: 276318 - DNA, 20 bp, synthetic construct
  source 1..20: mol_type = other DNA
gaaggtcgggcatggtggct

SEQ ID NO: 276319 - DNA, 20 bp, synthetic construct
  source 1..20: mol_type = other DNA
agaaggtcgggcatggtggc

SEQ ID NO: 276320 - DNA, 20 bp, synthetic construct
  source 1..20: mol_type = other DNA
gagaaggtcgggcatggtgg

SEQ ID NO: 276321 - DNA, 20 bp, synthetic construct
  source 1..20: mol_type = other DNA
agagaaggtcgggcatggtg

SEQ ID NO: 276322 - DNA, 20 bp, synthetic construct
  source 1..20: mol_type = other DNA
aagagaaggtcgggcatggt

SEQ ID NO: 276323 - DNA, 20 bp, synthetic construct
  source 1..20: mol_type = other DNA
aaagagaaggtcgggcatgg

SEQ ID NO: 276324 - DNA, 20 bp, synthetic construct
  source 1..20: mol_type = other DNA
aaaagagaaggtcgggcatg

SEQ ID NO: 276325 - DNA, 20 bp, synthetic construct
  source 1..20: mol_type = other DNA
aaaaagagaaggtcgggcat

SEQ ID NO: 276326 - DNA, 20 bp, synthetic construct
  source 1..20: mol_type = other DNA
taaaaagagaaggtcgggca

SEQ ID NO: 276327 - DNA, 20 bp, synthetic construct
  source 1..20: mol_type = other DNA
ttaaaaagagaaggtcgggc

SEQ ID NO: 276328 - DNA, 20 bp, synthetic construct
  source 1..20: mol_type = other DNA
cttaaaaagagaaggtcggg

SEQ ID NO: 276329 - DNA, 20 bp, synthetic construct
  source 1..20: mol_type = other DNA
ccttaaaaagagaaggtcgg

SEQ ID NO: 276330 - DNA, 20 bp, synthetic construct
  source 1..20: mol_type = other DNA
cccttaaaaagagaaggtcg

SEQ ID NO: 276331 - DNA, 20 bp, synthetic construct
  source 1..20: mol_type = other DNA
gcccttaaaaagagaaggtc

SEQ ID NO: 276332 - DNA, 20 bp, synthetic construct
  source 1..20: mol_type = other DNA
cgcccttaaaaagagaaggt

SEQ ID NO: 276333 - DNA, 20 bp, synthetic construct
  source 1..20: mol_type = other DNA
acgcccttaaaaagagaagg

SEQ ID NO: 276334 - DNA, 20 bp, synthetic construct
  source 1..20: mol_type = other DNA
cacgcccttaaaaagagaag

SEQ ID NO: 276335 - DNA, 20 bp, synthetic construct
  source 1..20: mol_type = other DNA
acacgcccttaaaaagagaa

SEQ ID NO: 276336 - DNA, 20 bp, synthetic construct
  source 1..20: mol_type = other DNA
cacacgcccttaaaaagaga

SEQ ID NO: 276337 - DNA, 20 bp, synthetic construct
  source 1..20: mol_type = other DNA
acacacgcccttaaaaagag

SEQ ID NO: 276338 - DNA, 20 bp, synthetic construct
  source 1..20: mol_type = other DNA
cacacacgcccttaaaaaga

SEQ ID NO: 276339 - DNA, 20 bp, synthetic construct
  source 1..20: mol_type = other DNA
acacacacgcccttaaaaag

SEQ ID NO: 276340 - DNA, 20 bp, synthetic construct
  source 1..20: mol_type = other DNA
cacacacacgcccttaaaaa

SEQ ID NO: 276341 - DNA, 20 bp, synthetic construct
  source 1..20: mol_type = other DNA
acacacacacgcccttaaaa

SEQ ID NO: 276342 - DNA, 20 bp, synthetic construct
  source 1..20: mol_type = other DNA
cacacacacacgcccttaaa

SEQ ID NO: 276343 - DNA, 20 bp, synthetic construct
  source 1..20: mol_type = other DNA
acacacacacacgcccttaa

SEQ ID NO: 276344 - DNA, 20 bp, synthetic construct
  source 1..20: mol_type = other DNA
cacacacacacacgccctta

SEQ ID NO: 276345 - DNA, 20 bp, synthetic construct
  source 1..20: mol_type = other DNA
acacacacacacacgccctt

SEQ ID NO: 276346 - DNA, 20 bp, synthetic construct
  source 1..20: mol_type = other DNA
cacacacacacacacgccct

SEQ ID NO: 276347 - DNA, 20 bp, synthetic construct
  source 1..20: mol_type = other DNA
acacacacacacacacgccc

SEQ ID NO: 276348 - DNA, 20 bp, synthetic construct
  source 1..20: mol_type = other DNA
cacacacacacacacacgcc

SEQ ID NO: 276349 - DNA, 20 bp, synthetic construct
  source 1..20: mol_type = other DNA
acacacacacacacacacgc

SEQ ID NO: 276350 - DNA, 20 bp, synthetic construct
  source 1..20: mol_type = other DNA
cacacacacacacacacacg

SEQ ID NO: 276351 - DNA, 20 bp, synthetic construct
  source 1..20: mol_type = other DNA
acacacacacacacacacac

SEQ ID NO: 276352 - DNA, 20 bp, synthetic construct
  source 1..20: mol_type = other DNA
cacacacacacacacacaca

SEQ ID NO: 276353 - DNA, 20 bp, synthetic construct
  source 1..20: mol_type = other DNA
acacacacacacacacacac

SEQ ID NO: 276354 - DNA, 20 bp, synthetic construct
  source 1..20: mol_type = other DNA
cacacacacacacacacaca

SEQ ID NO: 276355 - DNA, 20 bp, synthetic construct
  source 1..20: mol_type = other DNA
ccacacacacacacacacac

SEQ ID NO: 276356 - DNA, 20 bp, synthetic construct
  source 1..20: mol_type = other DNA
cccacacacacacacacaca

SEQ ID NO: 276357 - DNA, 20 bp, synthetic construct
  source 1..20: mol_type = other DNA
gcccacacacacacacacac

SEQ ID NO: 276358 - DNA, 20 bp, synthetic construct
  source 1..20: mol_type = other DNA
cgcccacacacacacacaca

SEQ ID NO: 276359 - DNA, 20 bp, synthetic construct
  source 1..20: mol_type = other DNA
gcgcccacacacacacacac

SEQ ID NO: 276360 - DNA, 20 bp, synthetic construct
  source 1..20: mol_type = other DNA
tgcgcccacacacacacaca

SEQ ID NO: 276361 - DNA, 20 bp, synthetic construct
  source 1..20: mol_type = other DNA
gtgcgcccacacacacacac

SEQ ID NO: 276362 - DNA, 20 bp, synthetic construct
  source 1..20: mol_type = other DNA
agtgcgcccacacacacaca

SEQ ID NO: 276363 - DNA, 20 bp, synthetic construct
  source 1..20: mol_type = other DNA
gagtgcgcccacacacacac

SEQ ID NO: 276364 - DNA, 20 bp, synthetic construct
  source 1..20: mol_type = other DNA
agagtgcgcccacacacaca

SEQ ID NO: 276365 - DNA, 20 bp, synthetic construct
  source 1..20: mol_type = other DNA
gagagtgcgcccacacacac

SEQ ID NO: 276366 - DNA, 20 bp, synthetic construct
  source 1..20: mol_type = other DNA
cgagagtgcgcccacacaca

SEQ ID NO: 276367 - DNA, 20 bp, synthetic construct
  source 1..20: mol_type = other DNA
acgagagtgcgcccacacac

SEQ ID NO: 276368 - DNA, 20 bp, synthetic construct
  source 1..20: mol_type = other DNA
gacgagagtgcgcccacaca

SEQ ID NO: 276369 - DNA, 20 bp, synthetic construct
  source 1..20: mol_type = other DNA
agacgagagtgcgcccacac

SEQ ID NO: 276370 - DNA, 20 bp, synthetic construct
  source 1..20: mol_type = other DNA
aagacgagagtgcgcccaca

SEQ ID NO: 276371 - DNA, 20 bp, synthetic construct
  source 1..20: mol_type = other DNA
gaagacgagagtgcgcccac

SEQ ID NO: 276372 - DNA, 20 bp, synthetic construct
  source 1..20: mol_type = other DNA
tgaagacgagagtgcgccca

SEQ ID NO: 276373 - DNA, 20 bp, synthetic construct
  source 1..20: mol_type = other DNA
gtgaagacgagagtgcgccc

SEQ ID NO: 276374 - DNA, 20 bp, synthetic construct
  source 1..20: mol_type = other DNA
ggtgaagacgagagtgcgcc

SEQ ID NO: 276375 - DNA, 20 bp, synthetic construct
  source 1..20: mol_type = other DNA
aggtgaagacgagagtgcgc

SEQ ID NO: 276376 - DNA, 20 bp, synthetic construct
  source 1..20: mol_type = other DNA
aaggtgaagacgagagtgcg

SEQ ID NO: 276377 - DNA, 20 bp, synthetic construct
  source 1..20: mol_type = other DNA
gaaggtgaagacgagagtgc

SEQ ID NO: 276378 - DNA, 20 bp, synthetic construct
  source 1..20: mol_type = other DNA
ggaaggtgaagacgagagtg

SEQ ID NO: 276379 - DNA, 20 bp, synthetic construct
  source 1..20: mol_type = other DNA
gggaaggtgaagacgagagt

SEQ ID NO: 276380 - DNA, 20 bp, synthetic construct
  source 1..20: mol_type = other DNA
ggggaaggtgaagacgagag

SEQ ID NO: 276381 - DNA, 20 bp, synthetic construct
  source 1..20: mol_type = other DNA
gggggaaggtgaagacgaga

SEQ ID NO: 276382 - DNA, 20 bp, synthetic construct
  source 1..20: mol_type = other DNA
tgggggaaggtgaagacgag

SEQ ID NO: 276383 - DNA, 20 bp, synthetic construct
  source 1..20: mol_type = other DNA
ctgggggaaggtgaagacga

SEQ ID NO: 276384 - DNA, 20 bp, synthetic construct
  source 1..20: mol_type = other DNA
gctgggggaaggtgaagacg

SEQ ID NO: 276385 - DNA, 20 bp, synthetic construct
  source 1..20: mol_type = other DNA
ggctgggggaaggtgaagac

SEQ ID NO: 276386 - DNA, 20 bp, synthetic construct
  source 1..20: mol_type = other DNA
aggctgggggaaggtgaaga

SEQ ID NO: 276387 - DNA, 20 bp, synthetic construct
  source 1..20: mol_type = other DNA
aaggctgggggaaggtgaag

SEQ ID NO: 276388 - DNA, 20 bp, synthetic construct
  source 1..20: mol_type = other DNA
caaggctgggggaaggtgaa

SEQ ID NO: 276389 - DNA, 20 bp, synthetic construct
  source 1..20: mol_type = other DNA
gcaaggctgggggaaggtga

SEQ ID NO: 276390 - DNA, 20 bp, synthetic construct
  source 1..20: mol_type = other DNA
agcaaggctgggggaaggtg

SEQ ID NO: 276391 - DNA, 20 bp, synthetic construct
  source 1..20: mol_type = other DNA
gagcaaggctgggggaaggt

SEQ ID NO: 276392 - DNA, 20 bp, synthetic construct
  source 1..20: mol_type = other DNA
agagcaaggctgggggaagg

SEQ ID NO: 276393 - DNA, 20 bp, synthetic construct
  source 1..20: mol_type = other DNA
cagagcaaggctgggggaag

SEQ ID NO: 276394 - DNA, 20 bp, synthetic construct
  source 1..20: mol_type = other DNA
acagagcaaggctgggggaa

SEQ ID NO: 276395 - DNA, 20 bp, synthetic construct
  source 1..20: mol_type = other DNA
gacagagcaaggctggggga

SEQ ID NO: 276396 - DNA, 20 bp, synthetic construct
  source 1..20: mol_type = other DNA
agacagagcaaggctggggg

SEQ ID NO: 276397 - DNA, 20 bp, synthetic construct
  source 1..20: mol_type = other DNA
gagacagagcaaggctgggg

SEQ ID NO: 276398 - DNA, 20 bp, synthetic construct
  source 1..20: mol_type = other DNA
agagacagagcaaggctggg

SEQ ID NO: 276399 - DNA, 20 bp, synthetic construct
  source 1..20: mol_type = other DNA
tagagacagagcaaggctgg

SEQ ID NO: 276400 - DNA, 20 bp, synthetic construct
  source 1..20: mol_type = other DNA
gtagagacagagcaaggctg

SEQ ID NO: 276401 - DNA, 20 bp, synthetic construct
  source 1..20: mol_type = other DNA
ggtagagacagagcaaggct

SEQ ID NO: 276402 - DNA, 20 bp, synthetic construct
  source 1..20: mol_type = other DNA
gggtagagacagagcaaggc

SEQ ID NO: 276403 - DNA, 20 bp, synthetic construct
  source 1..20: mol_type = other DNA
tgggtagagacagagcaagg

SEQ ID NO: 276404 - DNA, 20 bp, synthetic construct
  source 1..20: mol_type = other DNA
ctgggtagagacagagcaag

SEQ ID NO: 276405 - DNA, 20 bp, synthetic construct
  source 1..20: mol_type = other DNA
actgggtagagacagagcaa

SEQ ID NO: 276406 - DNA, 20 bp, synthetic construct
  source 1..20: mol_type = other DNA
gactgggtagagacagagca

SEQ ID NO: 276407 - DNA, 20 bp, synthetic construct
  source 1..20: mol_type = other DNA
tgactgggtagagacagagc

SEQ ID NO: 276408 - DNA, 20 bp, synthetic construct
  source 1..20: mol_type = other DNA
gtgactgggtagagacagag

SEQ ID NO: 276409 - DNA, 20 bp, synthetic construct
  source 1..20: mol_type = other DNA
ggtgactgggtagagacaga

SEQ ID NO: 276410 - DNA, 20 bp, synthetic construct
  source 1..20: mol_type = other DNA
aggtgactgggtagagacag

SEQ ID NO: 276411 - DNA, 20 bp, synthetic construct
  source 1..20: mol_type = other DNA
gaggtgactgggtagagaca

SEQ ID NO: 276412 - DNA, 20 bp, synthetic construct
  source 1..20: mol_type = other DNA
agaggtgactgggtagagac

SEQ ID NO: 276413 - DNA, 20 bp, synthetic construct
  source 1..20: mol_type = other DNA
cagaggtgactgggtagaga

SEQ ID NO: 276414 - DNA, 20 bp, synthetic construct
  source 1..20: mol_type = other DNA
gcagaggtgactgggtagag

SEQ ID NO: 276415 - DNA, 20 bp, synthetic construct
  source 1..20: mol_type = other DNA
ggcagaggtgactgggtaga

SEQ ID NO: 276416 - DNA, 20 bp, synthetic construct
  source 1..20: mol_type = other DNA
gggcagaggtgactgggtag

SEQ ID NO: 276417 - DNA, 20 bp, synthetic construct
  source 1..20: mol_type = other DNA
tgggcagaggtgactgggta

SEQ ID NO: 276418 - DNA, 20 bp, synthetic construct
  source 1..20: mol_type = other DNA
atgggcagaggtgactgggt

SEQ ID NO: 276419 - DNA, 20 bp, synthetic construct
  source 1..20: mol_type = other DNA
gatgggcagaggtgactggg

SEQ ID NO: 276420 - DNA, 20 bp, synthetic construct
  source 1..20: mol_type = other DNA
agatgggcagaggtgactgg

SEQ ID NO: 276421 - DNA, 20 bp, synthetic construct
  source 1..20: mol_type = other DNA
gagatgggcagaggtgactg

SEQ ID NO: 276422 - DNA, 20 bp, synthetic construct
  source 1..20: mol_type = other DNA
agagatgggcagaggtgact

SEQ ID NO: 276423 - DNA, 20 bp, synthetic construct
  source 1..20: mol_type = other DNA
gagagatgggcagaggtgac

SEQ ID NO: 276424 - DNA, 20 bp, synthetic construct
  source 1..20: mol_type = other DNA
ggagagatgggcagaggtga

SEQ ID NO: 276425 - DNA, 20 bp, synthetic construct
  source 1..20: mol_type = other DNA
cggagagatgggcagaggtg

SEQ ID NO: 276426 - DNA, 20 bp, synthetic construct
  source 1..20: mol_type = other DNA
tcggagagatgggcagaggt

SEQ ID NO: 276427 - DNA, 20 bp, synthetic construct
  source 1..20: mol_type = other DNA
atcggagagatgggcagagg

SEQ ID NO: 276428 - DNA, 20 bp, synthetic construct
  source 1..20: mol_type = other DNA
gatcggagagatgggcagag

SEQ ID NO: 276429 - DNA, 20 bp, synthetic construct
  source 1..20: mol_type = other DNA
agatcggagagatgggcaga

SEQ ID NO: 276430 - DNA, 20 bp, synthetic construct
  source 1..20: mol_type = other DNA
cagatcggagagatgggcag

SEQ ID NO: 276431 - DNA, 20 bp, synthetic construct
  source 1..20: mol_type = other DNA
acagatcggagagatgggca

SEQ ID NO: 276432 - DNA, 20 bp, synthetic construct
  source 1..20: mol_type = other DNA
aacagatcggagagatgggc

SEQ ID NO: 276433 - DNA, 20 bp, synthetic construct
  source 1..20: mol_type = other DNA
aaacagatcggagagatggg

SEQ ID NO: 276434 - DNA, 20 bp, synthetic construct
  source 1..20: mol_type = other DNA
gaaacagatcggagagatgg

SEQ ID NO: 276435 - DNA, 20 bp, synthetic construct
  source 1..20: mol_type = other DNA
agaaacagatcggagagatg

SEQ ID NO: 276436 - DNA, 20 bp, synthetic construct
  source 1..20: mol_type = other DNA
gagaaacagatcggagagat

SEQ ID NO: 276437 - DNA, 20 bp, synthetic construct
  source 1..20: mol_type = other DNA
agagaaacagatcggagaga

SEQ ID NO: 276438 - DNA, 20 bp, synthetic construct
  source 1..20: mol_type = other DNA
gagagaaacagatcggagag

SEQ ID NO: 276439 - DNA, 20 bp, synthetic construct
  source 1..20: mol_type = other DNA
agagagaaacagatcggaga

SEQ ID NO: 276440 - DNA, 20 bp, synthetic construct
  source 1..20: mol_type = other DNA
gagagagaaacagatcggag

SEQ ID NO: 276441 - DNA, 20 bp, synthetic construct
  source 1..20: mol_type = other DNA
ggagagagaaacagatcgga

SEQ ID NO: 276442 - DNA, 20 bp, synthetic construct
  source 1..20: mol_type = other DNA
aggagagagaaacagatcgg

SEQ ID NO: 276443 - DNA, 20 bp, synthetic construct
  source 1..20: mol_type = other DNA
aaggagagagaaacagatcg

SEQ ID NO: 276444 - DNA, 20 bp, synthetic construct
  source 1..20: mol_type = other DNA
aaaggagagagaaacagatc

SEQ ID NO: 276445 - DNA, 20 bp, synthetic construct
  source 1..20: mol_type = other DNA
aaaaggagagagaaacagat

SEQ ID NO: 276446 - DNA, 20 bp, synthetic construct
  source 1..20: mol_type = other DNA
taaaaggagagagaaacaga

SEQ ID NO: 276447 - DNA, 20 bp, synthetic construct
  source 1..20: mol_type = other DNA
gtaaaaggagagagaaacag

SEQ ID NO: 276448 - DNA, 20 bp, synthetic construct
  source 1..20: mol_type = other DNA
ggtaaaaggagagagaaaca

SEQ ID NO: 276449 - DNA, 20 bp, synthetic construct
  source 1..20: mol_type = other DNA
gggtaaaaggagagagaaac

SEQ ID NO: 276450 - DNA, 20 bp, synthetic construct
  source 1..20: mol_type = other DNA
ggggtaaaaggagagagaaa

SEQ ID NO: 276451 - DNA, 20 bp, synthetic construct
  source 1..20: mol_type = other DNA
aggggtaaaaggagagagaa

SEQ ID NO: 276452 - DNA, 20 bp, synthetic construct
  source 1..20: mol_type = other DNA
gaggggtaaaaggagagaga

SEQ ID NO: 276453 - DNA, 20 bp, synthetic construct
  source 1..20: mol_type = other DNA
agaggggtaaaaggagagag

SEQ ID NO: 276454 - DNA, 20 bp, synthetic construct
  source 1..20: mol_type = other DNA
aagaggggtaaaaggagaga

SEQ ID NO: 276455 - DNA, 20 bp, synthetic construct
  source 1..20: mol_type = other DNA
aaagaggggtaaaaggagag

SEQ ID NO: 276456 - DNA, 20 bp, synthetic construct
  source 1..20: mol_type = other DNA
gaaagaggggtaaaaggaga

SEQ ID NO: 276457 - DNA, 20 bp, synthetic construct
  source 1..20: mol_type = other DNA
ggaaagaggggtaaaaggag

SEQ ID NO: 276458 - DNA, 20 bp, synthetic construct
  source 1..20: mol_type = other DNA
aggaaagaggggtaaaagga

SEQ ID NO: 276459 - DNA, 20 bp, synthetic construct
  source 1..20: mol_type = other DNA
gaggaaagaggggtaaaagg

SEQ ID NO: 276460 - DNA, 20 bp, synthetic construct
  source 1..20: mol_type = other DNA
ggaggaaagaggggtaaaag

SEQ ID NO: 276461 - DNA, 20 bp, synthetic construct
  source 1..20: mol_type = other DNA
gggaggaaagaggggtaaaa

SEQ ID NO: 276462 - DNA, 20 bp, synthetic construct
  source 1..20: mol_type = other DNA
agggaggaaagaggggtaaa

SEQ ID NO: 276463 - DNA, 20 bp, synthetic construct
  source 1..20: mol_type = other DNA
gagggaggaaagaggggtaa

SEQ ID NO: 276464 - DNA, 20 bp, synthetic construct
  source 1..20: mol_type = other DNA
ggagggaggaaagaggggta

SEQ ID NO: 276465 - DNA, 20 bp, synthetic construct
  source 1..20: mol_type = other DNA
aggagggaggaaagaggggt

SEQ ID NO: 276466 - DNA, 20 bp, synthetic construct
  source 1..20: mol_type = other DNA
gaggagggaggaaagagggg

SEQ ID NO: 276467 - DNA, 20 bp, synthetic construct
  source 1..20: mol_type = other DNA
tgaggagggaggaaagaggg

SEQ ID NO: 276468 - DNA, 20 bp, synthetic construct
  source 1..20: mol_type = other DNA
atgaggagggaggaaagagg

SEQ ID NO: 276469 - DNA, 20 bp, synthetic construct
  source 1..20: mol_type = other DNA
tatgaggagggaggaaagag

SEQ ID NO: 276470 - DNA, 20 bp, synthetic construct
  source 1..20: mol_type = other DNA
gtatgaggagggaggaaaga

SEQ ID NO: 276471 - DNA, 20 bp, synthetic construct
  source 1..20: mol_type = other DNA
tgtatgaggagggaggaaag

SEQ ID NO: 276472 - DNA, 20 bp, synthetic construct
  source 1..20: mol_type = other DNA
gtgtatgaggagggaggaaa

SEQ ID NO: 276473 - DNA, 20 bp, synthetic construct
  source 1..20: mol_type = other DNA
ggtgtatgaggagggaggaa

SEQ ID NO: 276474 - DNA, 20 bp, synthetic construct
  source 1..20: mol_type = other DNA
tggtgtatgaggagggagga

SEQ ID NO: 276475 - DNA, 20 bp, synthetic construct
  source 1..20: mol_type = other DNA
gtggtgtatgaggagggagg

SEQ ID NO: 276476 - DNA, 20 bp, synthetic construct
  source 1..20: mol_type = other DNA
agtggtgtatgaggagggag

SEQ ID NO: 276477 - DNA, 20 bp, synthetic construct
  source 1..20: mol_type = other DNA
cagtggtgtatgaggaggga

SEQ ID NO: 276478 - DNA, 20 bp, synthetic construct
  source 1..20: mol_type = other DNA
tcagtggtgtatgaggaggg

SEQ ID NO: 276479 - DNA, 20 bp, synthetic construct
  source 1..20: mol_type = other DNA
gtcagtggtgtatgaggagg

SEQ ID NO: 276480 - DNA, 20 bp, synthetic construct
  source 1..20: mol_type = other DNA
ggtcagtggtgtatgaggag

SEQ ID NO: 276481 - DNA, 20 bp, synthetic construct
  source 1..20: mol_type = other DNA
tggtcagtggtgtatgagga

SEQ ID NO: 276482 - DNA, 20 bp, synthetic construct
  source 1..20: mol_type = other DNA
atggtcagtggtgtatgagg

SEQ ID NO: 276483 - DNA, 20 bp, synthetic construct
  source 1..20: mol_type = other DNA
aatggtcagtggtgtatgag

SEQ ID NO: 276484 - DNA, 20 bp, synthetic construct
  source 1..20: mol_type = other DNA
taatggtcagtggtgtatga

SEQ ID NO: 276485 - DNA, 20 bp, synthetic construct
  source 1..20: mol_type = other DNA
ataatggtcagtggtgtatg

SEQ ID NO: 276486 - DNA, 20 bp, synthetic construct
  source 1..20: mol_type = other DNA
tataatggtcagtggtgtat

SEQ ID NO: 276487 - DNA, 20 bp, synthetic construct
  source 1..20: mol_type = other DNA
ctataatggtcagtggtgta

SEQ ID NO: 276488 - DNA, 20 bp, synthetic construct
  source 1..20: mol_type = other DNA
tctataatggtcagtggtgt

SEQ ID NO: 276489 - DNA, 20 bp, synthetic construct
  source 1..20: mol_type = other DNA
ctctataatggtcagtggtg

SEQ ID NO: 276490 - DNA, 20 bp, synthetic construct
  source 1..20: mol_type = other DNA
tctctataatggtcagtggt

SEQ ID NO: 276491 - DNA, 20 bp, synthetic construct
  source 1..20: mol_type = other DNA
ttctctataatggtcagtgg

SEQ ID NO: 276492 - DNA, 20 bp, synthetic construct
  source 1..20: mol_type = other DNA
gttctctataatggtcagtg

SEQ ID NO: 276493 - DNA, 20 bp, synthetic construct
  source 1..20: mol_type = other DNA
agttctctataatggtcagt

SEQ ID NO: 276494 - DNA, 20 bp, synthetic construct
  source 1..20: mol_type = other DNA
cagttctctataatggtcag

SEQ ID NO: 276495 - DNA, 20 bp, synthetic construct
  source 1..20: mol_type = other DNA
tcagttctctataatggtca

SEQ ID NO: 276496 - DNA, 20 bp, synthetic construct
  source 1..20: mol_type = other DNA
ctcagttctctataatggtc

SEQ ID NO: 276497 - DNA, 20 bp, synthetic construct
  source 1..20: mol_type = other DNA
actcagttctctataatggt

SEQ ID NO: 276498 - DNA, 20 bp, synthetic construct
  source 1..20: mol_type = other DNA
tactcagttctctataatgg

SEQ ID NO: 276499 - DNA, 20 bp, synthetic construct
  source 1..20: mol_type = other DNA
atactcagttctctataatg

SEQ ID NO: 276500 - DNA, 20 bp, synthetic construct
  source 1..20: mol_type = other DNA
aatactcagttctctataat

SEQ ID NO: 276501 - DNA, 20 bp, synthetic construct
  source 1..20: mol_type = other DNA
gaatactcagttctctataa

SEQ ID NO: 276502 - DNA, 20 bp, synthetic construct
  source 1..20: mol_type = other DNA
agaatactcagttctctata

SEQ ID NO: 276503 - DNA, 20 bp, synthetic construct
  source 1..20: mol_type = other DNA
tagaatactcagttctctat

SEQ ID NO: 276504 - DNA, 20 bp, synthetic construct
  source 1..20: mol_type = other DNA
ttagaatactcagttctcta

SEQ ID NO: 276505 - DNA, 20 bp, synthetic construct
  source 1..20: mol_type = other DNA
tttagaatactcagttctct

SEQ ID NO: 276506 - DNA, 20 bp, synthetic construct
  source 1..20: mol_type = other DNA
ttttagaatactcagttctc

SEQ ID NO: 276507 - DNA, 20 bp, synthetic construct
  source 1..20: mol_type = other DNA
tttttagaatactcagttct

SEQ ID NO: 276508 - DNA, 20 bp, synthetic construct
  source 1..20: mol_type = other DNA
atttttagaatactcagttc

SEQ ID NO: 276509 - DNA, 20 bp, synthetic construct
  source 1..20: mol_type = other DNA
tatttttagaatactcagtt

SEQ ID NO: 276510 - DNA, 20 bp, synthetic construct
  source 1..20: mol_type = other DNA
gtatttttagaatactcagt

SEQ ID NO: 276511 - DNA, 20 bp, synthetic construct
  source 1..20: mol_type = other DNA
tgtatttttagaatactcag

SEQ ID NO: 276512 - DNA, 20 bp, synthetic construct
  source 1..20: mol_type = other DNA
atgtatttttagaatactca

SEQ ID NO: 276513 - DNA, 20 bp, synthetic construct
  source 1..20: mol_type = other DNA
aatgtatttttagaatactc

SEQ ID NO: 276514 - DNA, 20 bp, synthetic construct
  source 1..20: mol_type = other DNA
aaatgtatttttagaatact

SEQ ID NO: 276515 - DNA, 20 bp, synthetic construct
  source 1..20: mol_type = other DNA
aaaatgtatttttagaatac

SEQ ID NO: 276516 - DNA, 20 bp, synthetic construct
  source 1..20: mol_type = other DNA
taaaatgtatttttagaata

SEQ ID NO: 276517 - DNA, 20 bp, synthetic construct
  source 1..20: mol_type = other DNA
ataaaatgtatttttagaat

SEQ ID NO: 276518 - DNA, 20 bp, synthetic construct
  source 1..20: mol_type = other DNA
aataaaatgtatttttagaa

SEQ ID NO: 276519 - DNA, 20 bp, synthetic construct
  source 1..20: mol_type = other DNA
aaataaaatgtatttttaga

SEQ ID NO: 276520 - DNA, 20 bp, synthetic construct
  source 1..20: mol_type = other DNA
taaataaaatgtatttttag

SEQ ID NO: 276521 - DNA, 20 bp, synthetic construct
  source 1..20: mol_type = other DNA
ataaataaaatgtattttta

SEQ ID NO: 276522 - DNA, 20 bp, synthetic construct
  source 1..20: mol_type = other DNA
aataaataaaatgtattttt

SEQ ID NO: 276523 - DNA, 20 bp, synthetic construct
  source 1..20: mol_type = other DNA
aaataaataaaatgtatttt

SEQ ID NO: 276524 - DNA, 20 bp, synthetic construct
  source 1..20: mol_type = other DNA
taaataaataaaatgtattt

SEQ ID NO: 276525 - DNA, 20 bp, synthetic construct
  source 1..20: mol_type = other DNA
ataaataaataaaatgtatt

SEQ ID NO: 276526 - DNA, 20 bp, synthetic construct
  source 1..20: mol_type = other DNA
aataaataaataaaatgtat

SEQ ID NO: 276527 - DNA, 20 bp, synthetic construct
  source 1..20: mol_type = other DNA
aaataaataaataaaatgta

SEQ ID NO: 276528 - DNA, 20 bp, synthetic construct
  source 1..20: mol_type = other DNA
aaaataaataaataaaatgt

SEQ ID NO: 276529 - DNA, 20 bp, synthetic construct
  source 1..20: mol_type = other DNA
caaaataaataaataaaatg

SEQ ID NO: 276530 - DNA, 20 bp, synthetic construct
  source 1..20: mol_type = other DNA
tcaaaataaataaataaaat

SEQ ID NO: 276531 - DNA, 20 bp, synthetic construct
  source 1..20: mol_type = other DNA
ctcaaaataaataaataaaa

SEQ ID NO: 276532 - DNA, 20 bp, synthetic construct
  source 1..20: mol_type = other DNA
tctcaaaataaataaataaa

SEQ ID NO: 276533 - DNA, 20 bp, synthetic construct
  source 1..20: mol_type = other DNA
gtctcaaaataaataaataa

SEQ ID NO: 276534 - DNA, 20 bp, synthetic construct
  source 1..20: mol_type = other DNA
tgtctcaaaataaataaata

SEQ ID NO: 276535 - DNA, 20 bp, synthetic construct
  source 1..20: mol_type = other DNA
ctgtctcaaaataaataaat

SEQ ID NO: 276536 - DNA, 20 bp, synthetic construct
  source 1..20: mol_type = other DNA
tctgtctcaaaataaataaa

SEQ ID NO: 276537 - DNA, 20 bp, synthetic construct
  source 1..20: mol_type = other DNA
ctctgtctcaaaataaataa

SEQ ID NO: 276538 - DNA, 20 bp, synthetic construct
  source 1..20: mol_type = other DNA
actctgtctcaaaataaata

SEQ ID NO: 276539 - DNA, 20 bp, synthetic construct
  source 1..20: mol_type = other DNA
gactctgtctcaaaataaat

SEQ ID NO: 276540 - DNA, 20 bp, synthetic construct
  source 1..20: mol_type = other DNA
agactctgtctcaaaataaa

SEQ ID NO: 276541 - DNA, 20 bp, synthetic construct
  source 1..20: mol_type = other DNA
gagactctgtctcaaaataa

SEQ ID NO: 276542 - DNA, 20 bp, synthetic construct
  source 1..20: mol_type = other DNA
tgagactctgtctcaaaata

SEQ ID NO: 276543 - DNA, 20 bp, synthetic construct
  source 1..20: mol_type = other DNA
gtgagactctgtctcaaaat

SEQ ID NO: 276544 - DNA, 20 bp, synthetic construct
  source 1..20: mol_type = other DNA
agtgagactctgtctcaaaa

SEQ ID NO: 276545 - DNA, 20 bp, synthetic construct
  source 1..20: mol_type = other DNA
gagtgagactctgtctcaaa

SEQ ID NO: 276546 - DNA, 20 bp, synthetic construct
  source 1..20: mol_type = other DNA
agagtgagactctgtctcaa

SEQ ID NO: 276547 - DNA, 20 bp, synthetic construct
  source 1..20: mol_type = other DNA
cagagtgagactctgtctca

SEQ ID NO: 276548 - DNA, 20 bp, synthetic construct
  source 1..20: mol_type = other DNA
acagagtgagactctgtctc

SEQ ID NO: 276549 - DNA, 20 bp, synthetic construct
  source 1..20: mol_type = other DNA
gacagagtgagactctgtct

SEQ ID NO: 276550 - DNA, 20 bp, synthetic construct
  source 1..20: mol_type = other DNA
tgacagagtgagactctgtc

SEQ ID NO: 276551 - DNA, 20 bp, synthetic construct
  source 1..20: mol_type = other DNA
gtgacagagtgagactctgt

SEQ ID NO: 276552 - DNA, 20 bp, synthetic construct
  source 1..20: mol_type = other DNA
ggtgacagagtgagactctg

SEQ ID NO: 276553 - DNA, 20 bp, synthetic construct
  source 1..20: mol_type = other DNA
gggtgacagagtgagactct

SEQ ID NO: 276554 - DNA, 20 bp, synthetic construct
  source 1..20: mol_type = other DNA
tgggtgacagagtgagactc

SEQ ID NO: 276555 - DNA, 20 bp, synthetic construct
  source 1..20: mol_type = other DNA
ctgggtgacagagtgagact

SEQ ID NO: 276556 - DNA, 20 bp, synthetic construct
  source 1..20: mol_type = other DNA
cctgggtgacagagtgagac

SEQ ID NO: 276557 - DNA, 20 bp, synthetic construct
  source 1..20: mol_type = other DNA
gcctgggtgacagagtgaga

SEQ ID NO: 276558 - DNA, 20 bp, synthetic construct
  source 1..20: mol_type = other DNA
agcctgggtgacagagtgag

SEQ ID NO: 276559 - DNA, 20 bp, synthetic construct
  source 1..20: mol_type = other DNA
cagcctgggtgacagagtga

SEQ ID NO: 276560 - DNA, 20 bp, synthetic construct
  source 1..20: mol_type = other DNA
ccagcctgggtgacagagtg

SEQ ID NO: 276561 - DNA, 20 bp, synthetic construct
  source 1..20: mol_type = other DNA
tccagcctgggtgacagagt

SEQ ID NO: 276562 - DNA, 20 bp, synthetic construct
  source 1..20: mol_type = other DNA
ctccagcctgggtgacagag

SEQ ID NO: 276563 - DNA, 20 bp, synthetic construct
  source 1..20: mol_type = other DNA
actccagcctgggtgacaga

SEQ ID NO: 276564 - DNA, 20 bp, synthetic construct
  source 1..20: mol_type = other DNA
cactccagcctgggtgacag

SEQ ID NO: 276565 - DNA, 20 bp, synthetic construct
  source 1..20: mol_type = other DNA
gcactccagcctgggtgaca

SEQ ID NO: 276566 - DNA, 20 bp, synthetic construct
  source 1..20: mol_type = other DNA
tgcactccagcctgggtgac

SEQ ID NO: 276567 - DNA, 20 bp, synthetic construct
  source 1..20: mol_type = other DNA
ctgcactccagcctgggtga

SEQ ID NO: 276568 - DNA, 20 bp, synthetic construct
  source 1..20: mol_type = other DNA
actgcactccagcctgggtg

SEQ ID NO: 276569 - DNA, 20 bp, synthetic construct
  source 1..20: mol_type = other DNA
cactgcactccagcctgggt

SEQ ID NO: 276570 - DNA, 20 bp, synthetic construct
  source 1..20: mol_type = other DNA
ccactgcactccagcctggg

SEQ ID NO: 276571 - DNA, 20 bp, synthetic construct
  source 1..20: mol_type = other DNA
accactgcactccagcctgg

SEQ ID NO: 276572 - DNA, 20 bp, synthetic construct
  source 1..20: mol_type = other DNA
caccactgcactccagcctg

SEQ ID NO: 276573 - DNA, 20 bp, synthetic construct
  source 1..20: mol_type = other DNA
gcaccactgcactccagcct

SEQ ID NO: 276574 - DNA, 20 bp, synthetic construct
  source 1..20: mol_type = other DNA
tgcaccactgcactccagcc

SEQ ID NO: 276575 - DNA, 20 bp, synthetic construct
  source 1..20: mol_type = other DNA
ttgcaccactgcactccagc

SEQ ID NO: 276576 - DNA, 20 bp, synthetic construct
  source 1..20: mol_type = other DNA
attgcaccactgcactccag

SEQ ID NO: 276577 - DNA, 20 bp, synthetic construct
  source 1..20: mol_type = other DNA
gattgcaccactgcactcca

SEQ ID NO: 276578 - DNA, 20 bp, synthetic construct
  source 1..20: mol_type = other DNA
agattgcaccactgcactcc

SEQ ID NO: 276579 - DNA, 20 bp, synthetic construct
  source 1..20: mol_type = other DNA
gagattgcaccactgcactc

SEQ ID NO: 276580 - DNA, 20 bp, synthetic construct
  source 1..20: mol_type = other DNA
cgagattgcaccactgcact

SEQ ID NO: 276581 - DNA, 20 bp, synthetic construct
  source 1..20: mol_type = other DNA
ccgagattgcaccactgcac

SEQ ID NO: 276582 - DNA, 20 bp, synthetic construct
  source 1..20: mol_type = other DNA
gccgagattgcaccactgca

SEQ ID NO: 276583 - DNA, 20 bp, synthetic construct
  source 1..20: mol_type = other DNA
agccgagattgcaccactgc

SEQ ID NO: 276584 - DNA, 20 bp, synthetic construct
  source 1..20: mol_type = other DNA
gagccgagattgcaccactg

SEQ ID NO: 276585 - DNA, 20 bp, synthetic construct
  source 1..20: mol_type = other DNA
tgagccgagattgcaccact

SEQ ID NO: 276586 - DNA, 20 bp, synthetic construct
  source 1..20: mol_type = other DNA
gtgagccgagattgcaccac

SEQ ID NO: 276587 - DNA, 20 bp, synthetic construct
  source 1..20: mol_type = other DNA
agtgagccgagattgcacca

SEQ ID NO: 276588 - DNA, 20 bp, synthetic construct
  source 1..20: mol_type = other DNA
cagtgagccgagattgcacc

SEQ ID NO: 276589 - DNA, 20 bp, synthetic construct
  source 1..20: mol_type = other DNA
gcagtgagccgagattgcac

SEQ ID NO: 276590 - DNA, 20 bp, synthetic construct
  source 1..20: mol_type = other DNA
tgcagtgagccgagattgca

SEQ ID NO: 276591 - DNA, 20 bp, synthetic construct
  source 1..20: mol_type = other DNA
ttgcagtgagccgagattgc

SEQ ID NO: 276592 - DNA, 20 bp, synthetic construct
  source 1..20: mol_type = other DNA
gttgcagtgagccgagattg

SEQ ID NO: 276593 - DNA, 20 bp, synthetic construct
  source 1..20: mol_type = other DNA
ggttgcagtgagccgagatt

SEQ ID NO: 276594 - DNA, 20 bp, synthetic construct
  source 1..20: mol_type = other DNA
aggttgcagtgagccgagat

SEQ ID NO: 276595 - DNA, 20 bp, synthetic construct
  source 1..20: mol_type = other DNA
gaggttgcagtgagccgaga

SEQ ID NO: 276596 - DNA, 20 bp, synthetic construct
  source 1..20: mol_type = other DNA
ggaggttgcagtgagccgag

SEQ ID NO: 276597 - DNA, 20 bp, synthetic construct
  source 1..20: mol_type = other DNA
cggaggttgcagtgagccga

SEQ ID NO: 276598 - DNA, 20 bp, synthetic construct
  source 1..20: mol_type = other DNA
gcggaggttgcagtgagccg

SEQ ID NO: 276599 - DNA, 20 bp, synthetic construct
  source 1..20: mol_type = other DNA
ggcggaggttgcagtgagcc

SEQ ID NO: 276600 - DNA, 20 bp, synthetic construct
  source 1..20: mol_type = other DNA
aggcggaggttgcagtgagc

SEQ ID NO: 276601 - DNA, 20 bp, synthetic construct
  source 1..20: mol_type = other DNA
gaggcggaggttgcagtgag

SEQ ID NO: 276602 - DNA, 20 bp, synthetic construct
  source 1..20: mol_type = other DNA
ggaggcggaggttgcagtga

SEQ ID NO: 276603 - DNA, 20 bp, synthetic construct
  source 1..20: mol_type = other DNA
gggaggcggaggttgcagtg

SEQ ID NO: 276604 - DNA, 20 bp, synthetic construct
  source 1..20: mol_type = other DNA
tgggaggcggaggttgcagt

SEQ ID NO: 276605 - DNA, 20 bp, synthetic construct
  source 1..20: mol_type = other DNA
ctgggaggcggaggttgcag

SEQ ID NO: 276606 - DNA, 20 bp, synthetic construct
  source 1..20: mol_type = other DNA
cctgggaggcggaggttgca

SEQ ID NO: 276607 - DNA, 20 bp, synthetic construct
  source 1..20: mol_type = other DNA
acctgggaggcggaggttgc

SEQ ID NO: 276608 - DNA, 20 bp, synthetic construct
  source 1..20: mol_type = other DNA
aacctgggaggcggaggttg

SEQ ID NO: 276609 - DNA, 20 bp, synthetic construct
  source 1..20: mol_type = other DNA
caacctgggaggcggaggtt

SEQ ID NO: 276610 - DNA, 20 bp, synthetic construct
  source 1..20: mol_type = other DNA
tcaacctgggaggcggaggt

SEQ ID NO: 276611 - DNA, 20 bp, synthetic construct
  source 1..20: mol_type = other DNA
ttcaacctgggaggcggagg

SEQ ID NO: 276612 - DNA, 20 bp, synthetic construct
  source 1..20: mol_type = other DNA
cttcaacctgggaggcggag

SEQ ID NO: 276613 - DNA, 20 bp, synthetic construct
  source 1..20: mol_type = other DNA
gcttcaacctgggaggcgga

SEQ ID NO: 276614 - DNA, 20 bp, synthetic construct
  source 1..20: mol_type = other DNA
tgcttcaacctgggaggcgg

SEQ ID NO: 276615 - DNA, 20 bp, synthetic construct
  source 1..20: mol_type = other DNA
ttgcttcaacctgggaggcg

SEQ ID NO: 276616 - DNA, 20 bp, synthetic construct
  source 1..20: mol_type = other DNA
gttgcttcaacctgggaggc

SEQ ID NO: 276617 - DNA, 20 bp, synthetic construct
  source 1..20: mol_type = other DNA
agttgcttcaacctgggagg

SEQ ID NO: 276618 - DNA, 20 bp, synthetic construct
  source 1..20: mol_type = other DNA
gagttgcttcaacctgggag

SEQ ID NO: 276619 - DNA, 20 bp, synthetic construct
  source 1..20: mol_type = other DNA
agagttgcttcaacctggga

SEQ ID NO: 276620 - DNA, 20 bp, synthetic construct
  source 1..20: mol_type = other DNA
gagagttgcttcaacctggg

SEQ ID NO: 276621 - DNA, 20 bp, synthetic construct
  source 1..20: mol_type = other DNA
ggagagttgcttcaacctgg

SEQ ID NO: 276622 - DNA, 20 bp, synthetic construct
  source 1..20: mol_type = other DNA
aggagagttgcttcaacctg

SEQ ID NO: 276623 - DNA, 20 bp, synthetic construct
  source 1..20: mol_type = other DNA
caggagagttgcttcaacct

SEQ ID NO: 276624 - DNA, 20 bp, synthetic construct
  source 1..20: mol_type = other DNA
gcaggagagttgcttcaacc

SEQ ID NO: 276625 - DNA, 20 bp, synthetic construct
  source 1..20: mol_type = other DNA
ggcaggagagttgcttcaac

SEQ ID NO: 276626 - DNA, 20 bp, synthetic construct
  source 1..20: mol_type = other DNA
aggcaggagagttgcttcaa

SEQ ID NO: 276627 - DNA, 20 bp, synthetic construct
  source 1..20: mol_type = other DNA
gaggcaggagagttgcttca

SEQ ID NO: 276628 - DNA, 20 bp, synthetic construct
  source 1..20: mol_type = other DNA
tgaggcaggagagttgcttc

SEQ ID NO: 276629 - DNA, 20 bp, synthetic construct
  source 1..20: mol_type = other DNA
ctgaggcaggagagttgctt

SEQ ID NO: 276630 - DNA, 20 bp, synthetic construct
  source 1..20: mol_type = other DNA
gctgaggcaggagagttgct

SEQ ID NO: 276631 - DNA, 20 bp, synthetic construct
  source 1..20: mol_type = other DNA
ggctgaggcaggagagttgc

SEQ ID NO: 276632 - DNA, 20 bp, synthetic construct
  source 1..20: mol_type = other DNA
aggctgaggcaggagagttg

SEQ ID NO: 276633 - DNA, 20 bp, synthetic construct
  source 1..20: mol_type = other DNA
gaggctgaggcaggagagtt

SEQ ID NO: 276634 - DNA, 20 bp, synthetic construct
  source 1..20: mol_type = other DNA
ggaggctgaggcaggagagt

SEQ ID NO: 276635 - DNA, 20 bp, synthetic construct
  source 1..20: mol_type = other DNA
gggaggctgaggcaggagag

SEQ ID NO: 276636 - DNA, 20 bp, synthetic construct
  source 1..20: mol_type = other DNA
agggaggctgaggcaggaga

SEQ ID NO: 276637 - DNA, 20 bp, synthetic construct
  source 1..20: mol_type = other DNA
tagggaggctgaggcaggag

SEQ ID NO: 276638 - DNA, 20 bp, synthetic construct
  source 1..20: mol_type = other DNA
ctagggaggctgaggcagga

SEQ ID NO: 276639 - DNA, 20 bp, synthetic construct
  source 1..20: mol_type = other DNA
actagggaggctgaggcagg

SEQ ID NO: 276640 - DNA, 20 bp, synthetic construct
  source 1..20: mol_type = other DNA
tactagggaggctgaggcag

SEQ ID NO: 276641 - DNA, 20 bp, synthetic construct
  source 1..20: mol_type = other DNA
ctactagggaggctgaggca

SEQ ID NO: 276642 - DNA, 20 bp, synthetic construct
  source 1..20: mol_type = other DNA
gctactagggaggctgaggc

SEQ ID NO: 276643 - DNA, 20 bp, synthetic construct
  source 1..20: mol_type = other DNA
agctactagggaggctgagg

SEQ ID NO: 276644 - DNA, 20 bp, synthetic construct
  source 1..20: mol_type = other DNA
cagctactagggaggctgag

SEQ ID NO: 276645 - DNA, 20 bp, synthetic construct
  source 1..20: mol_type = other DNA
ccagctactagggaggctga

SEQ ID NO: 276646 - DNA, 20 bp, synthetic construct
  source 1..20: mol_type = other DNA
cccagctactagggaggctg

SEQ ID NO: 276647 - DNA, 20 bp, synthetic construct
  source 1..20: mol_type = other DNA
tcccagctactagggaggct

SEQ ID NO: 276648 - DNA, 20 bp, synthetic construct
  source 1..20: mol_type = other DNA
atcccagctactagggaggc

SEQ ID NO: 276649 - DNA, 20 bp, synthetic construct
  source 1..20: mol_type = other DNA
aatcccagctactagggagg

SEQ ID NO: 276650 - DNA, 20 bp, synthetic construct
  source 1..20: mol_type = other DNA
taatcccagctactagggag

SEQ ID NO: 276651 - DNA, 20 bp, synthetic construct
  source 1..20: mol_type = other DNA
gtaatcccagctactaggga

SEQ ID NO: 276652 - DNA, 20 bp, synthetic construct
  source 1..20: mol_type = other DNA
tgtaatcccagctactaggg

SEQ ID NO: 276653 - DNA, 20 bp, synthetic construct
  source 1..20: mol_type = other DNA
ttgtaatcccagctactagg

SEQ ID NO: 276654 - DNA, 20 bp, synthetic construct
  source 1..20: mol_type = other DNA
cttgtaatcccagctactag

SEQ ID NO: 276655 - DNA, 20 bp, synthetic construct
  source 1..20: mol_type = other DNA
gcttgtaatcccagctacta

SEQ ID NO: 276656 - DNA, 20 bp, synthetic construct
  source 1..20: mol_type = other DNA
tgcttgtaatcccagctact

SEQ ID NO: 276657 - DNA, 20 bp, synthetic construct
  source 1..20: mol_type = other DNA
gtgcttgtaatcccagctac

SEQ ID NO: 276658 - DNA, 20 bp, synthetic construct
  source 1..20: mol_type = other DNA
tgtgcttgtaatcccagcta

SEQ ID NO: 276659 - DNA, 20 bp, synthetic construct
  source 1..20: mol_type = other DNA
gtgtgcttgtaatcccagct

SEQ ID NO: 276660 - DNA, 20 bp, synthetic construct
  source 1..20: mol_type = other DNA
tgtgtgcttgtaatcccagc

SEQ ID NO: 276661 - DNA, 20 bp, synthetic construct
  source 1..20: mol_type = other DNA
gtgtgtgcttgtaatcccag

SEQ ID NO: 276662 - DNA, 20 bp, synthetic construct
  source 1..20: mol_type = other DNA
ggtgtgtgcttgtaatccca

SEQ ID NO: 276663 - DNA, 20 bp, synthetic construct
  source 1..20: mol_type = other DNA
tggtgtgtgcttgtaatccc

SEQ ID NO: 276664 - DNA, 20 bp, synthetic construct
  source 1..20: mol_type = other DNA
gtggtgtgtgcttgtaatcc

SEQ ID NO: 276665 - DNA, 20 bp, synthetic construct
  source 1..20: mol_type = other DNA
ggtggtgtgtgcttgtaatc

SEQ ID NO: 276666 - DNA, 20 bp, synthetic construct
  source 1..20: mol_type = other DNA
tggtggtgtgtgcttgtaat

SEQ ID NO: 276667 - DNA, 20 bp, synthetic construct
  source 1..20: mol_type = other DNA
atggtggtgtgtgcttgtaa

SEQ ID NO: 276668 - DNA, 20 bp, synthetic construct
  source 1..20: mol_type = other DNA
catggtggtgtgtgcttgta

SEQ ID NO: 276669 - DNA, 20 bp, synthetic construct
  source 1..20: mol_type = other DNA
gcatggtggtgtgtgcttgt

SEQ ID NO: 276670 - DNA, 20 bp, synthetic construct
  source 1..20: mol_type = other DNA
ggcatggtggtgtgtgcttg

SEQ ID NO: 276671 - DNA, 20 bp, synthetic construct
  source 1..20: mol_type = other DNA
aggcatggtggtgtgtgctt

SEQ ID NO: 276672 - DNA, 20 bp, synthetic construct
  source 1..20: mol_type = other DNA
taggcatggtggtgtgtgct

SEQ ID NO: 276673 - DNA, 20 bp, synthetic construct
  source 1..20: mol_type = other DNA
ctaggcatggtggtgtgtgc

SEQ ID NO: 276674 - DNA, 20 bp, synthetic construct
  source 1..20: mol_type = other DNA
gctaggcatggtggtgtgtg

SEQ ID NO: 276675 - DNA, 20 bp, synthetic construct
  source 1..20: mol_type = other DNA
tgctaggcatggtggtgtgt

SEQ ID NO: 276676 - DNA, 20 bp, synthetic construct
  source 1..20: mol_type = other DNA
ttgctaggcatggtggtgtg

SEQ ID NO: 276677 - DNA, 20 bp, synthetic construct
  source 1..20: mol_type = other DNA
tttgctaggcatggtggtgt

SEQ ID NO: 276678 - DNA, 20 bp, synthetic construct
  source 1..20: mol_type = other DNA
atttgctaggcatggtggtg

SEQ ID NO: 276679 - DNA, 20 bp, synthetic construct
  source 1..20: mol_type = other DNA
aatttgctaggcatggtggt

SEQ ID NO: 276680 - DNA, 20 bp, synthetic construct
  source 1..20: mol_type = other DNA
aaatttgctaggcatggtgg

SEQ ID NO: 276681 - DNA, 20 bp, synthetic construct
  source 1..20: mol_type = other DNA
aaaatttgctaggcatggtg

SEQ ID NO: 276682 - DNA, 20 bp, synthetic construct
  source 1..20: mol_type = other DNA
aaaaatttgctaggcatggt

SEQ ID NO: 276683 - DNA, 20 bp, synthetic construct
  source 1..20: mol_type = other DNA
taaaaatttgctaggcatgg

SEQ ID NO: 276684 - DNA, 20 bp, synthetic construct
  source 1..20: mol_type = other DNA
ataaaaatttgctaggcatg

SEQ ID NO: 276685 - DNA, 20 bp, synthetic construct
  source 1..20: mol_type = other DNA
tataaaaatttgctaggcat

SEQ ID NO: 276686 - DNA, 20 bp, synthetic construct
  source 1..20: mol_type = other DNA
atataaaaatttgctaggca

SEQ ID NO: 276687 - DNA, 20 bp, synthetic construct
  source 1..20: mol_type = other DNA
aatataaaaatttgctaggc

SEQ ID NO: 276688 - DNA, 20 bp, synthetic construct
  source 1..20: mol_type = other DNA
aaatataaaaatttgctagg

SEQ ID NO: 276689 - DNA, 20 bp, synthetic construct
  source 1..20: mol_type = other DNA
aaaatataaaaatttgctag

SEQ ID NO: 276690 - DNA, 20 bp, synthetic construct
  source 1..20: mol_type = other DNA
aaaaatataaaaatttgcta

SEQ ID NO: 276691 - DNA, 20 bp, synthetic construct
  source 1..20: mol_type = other DNA
taaaaatataaaaatttgct

SEQ ID NO: 276692 - DNA, 20 bp, synthetic construct
  source 1..20: mol_type = other DNA
ctaaaaatataaaaatttgc

SEQ ID NO: 276693 - DNA, 20 bp, synthetic construct
  source 1..20: mol_type = other DNA
actaaaaatataaaaatttg

SEQ ID NO: 276694 - DNA, 20 bp, synthetic construct
  source 1..20: mol_type = other DNA
tactaaaaatataaaaattt

SEQ ID NO: 276695 - DNA, 20 bp, synthetic construct
  source 1..20: mol_type = other DNA
ctactaaaaatataaaaatt

SEQ ID NO: 276696 - DNA, 20 bp, synthetic construct
  source 1..20: mol_type = other DNA
tctactaaaaatataaaaat

SEQ ID NO: 276697 - DNA, 20 bp, synthetic construct
  source 1..20: mol_type = other DNA
ctctactaaaaatataaaaa

SEQ ID NO: 276698 - DNA, 20 bp, synthetic construct
  source 1..20: mol_type = other DNA
cctctactaaaaatataaaa

SEQ ID NO: 276699 - DNA, 20 bp, synthetic construct
  source 1..20: mol_type = other DNA
tcctctactaaaaatataaa

SEQ ID NO: 276700 - DNA, 20 bp, synthetic construct
  source 1..20: mol_type = other DNA
ctcctctactaaaaatataa

SEQ ID NO: 276701 - DNA, 20 bp, synthetic construct
  source 1..20: mol_type = other DNA
cctcctctactaaaaatata

SEQ ID NO: 276702 - DNA, 20 bp, synthetic construct
  source 1..20: mol_type = other DNA
ccctcctctactaaaaatat

SEQ ID NO: 276703 - DNA, 20 bp, synthetic construct
  source 1..20: mol_type = other DNA
cccctcctctactaaaaata

SEQ ID NO: 276704 - DNA, 20 bp, synthetic construct
  source 1..20: mol_type = other DNA
acccctcctctactaaaaat

SEQ ID NO: 276705 - DNA, 20 bp, synthetic construct
  source 1..20: mol_type = other DNA
cacccctcctctactaaaaa

SEQ ID NO: 276706 - DNA, 20 bp, synthetic construct
  source 1..20: mol_type = other DNA
acacccctcctctactaaaa

SEQ ID NO: 276707 - DNA, 20 bp, synthetic construct
  source 1..20: mol_type = other DNA
gacacccctcctctactaaa

SEQ ID NO: 276708 - DNA, 20 bp, synthetic construct
  source 1..20: mol_type = other DNA
tgacacccctcctctactaa

SEQ ID NO: 276709 - DNA, 20 bp, synthetic construct
  source 1..20: mol_type = other DNA
gtgacacccctcctctacta

SEQ ID NO: 276710 - DNA, 20 bp, synthetic construct
  source 1..20: mol_type = other DNA
ggtgacacccctcctctact

SEQ ID NO: 276711 - DNA, 20 bp, synthetic construct
  source 1..20: mol_type = other DNA
tggtgacacccctcctctac

SEQ ID NO: 276712 - DNA, 20 bp, synthetic construct
  source 1..20: mol_type = other DNA
atggtgacacccctcctcta

SEQ ID NO: 276713 - DNA, 20 bp, synthetic construct
  source 1..20: mol_type = other DNA
catggtgacacccctcctct

SEQ ID NO: 276714 - DNA, 20 bp, synthetic construct
  source 1..20: mol_type = other DNA
acatggtgacacccctcctc

SEQ ID NO: 276715 - DNA, 20 bp, synthetic construct
  source 1..20: mol_type = other DNA
aacatggtgacacccctcct

SEQ ID NO: 276716 - DNA, 20 bp, synthetic construct
  source 1..20: mol_type = other DNA
aaacatggtgacacccctcc

SEQ ID NO: 276717 - DNA, 20 bp, synthetic construct
  source 1..20: mol_type = other DNA
caaacatggtgacacccctc

SEQ ID NO: 276718 - DNA, 20 bp, synthetic construct
  source 1..20: mol_type = other DNA
gcaaacatggtgacacccct

SEQ ID NO: 276719 - DNA, 20 bp, synthetic construct
  source 1..20: mol_type = other DNA
ggcaaacatggtgacacccc

SEQ ID NO: 276720 - DNA, 20 bp, synthetic construct
  source 1..20: mol_type = other DNA
tggcaaacatggtgacaccc

SEQ ID NO: 276721 - DNA, 20 bp, synthetic construct
  source 1..20: mol_type = other DNA
ttggcaaacatggtgacacc

SEQ ID NO: 276722 - DNA, 20 bp, synthetic construct
  source 1..20: mol_type = other DNA
cttggcaaacatggtgacac

SEQ ID NO: 276723 - DNA, 20 bp, synthetic construct
  source 1..20: mol_type = other DNA
gcttggcaaacatggtgaca

SEQ ID NO: 276724 - DNA, 20 bp, synthetic construct
  source 1..20: mol_type = other DNA
agcttggcaaacatggtgac

SEQ ID NO: 276725 - DNA, 20 bp, synthetic construct
  source 1..20: mol_type = other DNA
cagcttggcaaacatggtga

SEQ ID NO: 276726 - DNA, 20 bp, synthetic construct
  source 1..20: mol_type = other DNA
ccagcttggcaaacatggtg

SEQ ID NO: 276727 - DNA, 20 bp, synthetic construct
  source 1..20: mol_type = other DNA
accagcttggcaaacatggt

SEQ ID NO: 276728 - DNA, 20 bp, synthetic construct
  source 1..20: mol_type = other DNA
gaccagcttggcaaacatgg

SEQ ID NO: 276729 - DNA, 20 bp, synthetic construct
  source 1..20: mol_type = other DNA
agaccagcttggcaaacatg

SEQ ID NO: 276730 - DNA, 20 bp, synthetic construct
  source 1..20: mol_type = other DNA
gagaccagcttggcaaacat

SEQ ID NO: 276731 - DNA, 20 bp, synthetic construct
  source 1..20: mol_type = other DNA
tgagaccagcttggcaaaca

SEQ ID NO: 276732 - DNA, 20 bp, synthetic construct
  source 1..20: mol_type = other DNA
ttgagaccagcttggcaaac

SEQ ID NO: 276733 - DNA, 20 bp, synthetic construct
  source 1..20: mol_type = other DNA
tttgagaccagcttggcaaa

SEQ ID NO: 276734 - DNA, 20 bp, synthetic construct
  source 1..20: mol_type = other DNA
gtttgagaccagcttggcaa

SEQ ID NO: 276735 - DNA, 20 bp, synthetic construct
  source 1..20: mol_type = other DNA
agtttgagaccagcttggca

SEQ ID NO: 276736 - DNA, 20 bp, synthetic construct
  source 1..20: mol_type = other DNA
gagtttgagaccagcttggc

SEQ ID NO: 276737 - DNA, 20 bp, synthetic construct
  source 1..20: mol_type = other DNA
ggagtttgagaccagcttgg

SEQ ID NO: 276738 - DNA, 20 bp, synthetic construct
  source 1..20: mol_type = other DNA
aggagtttgagaccagcttg

SEQ ID NO: 276739 - DNA, 20 bp, synthetic construct
  source 1..20: mol_type = other DNA
caggagtttgagaccagctt

SEQ ID NO: 276740 - DNA, 20 bp, synthetic construct
  source 1..20: mol_type = other DNA
ccaggagtttgagaccagct

SEQ ID NO: 276741 - DNA, 20 bp, synthetic construct
  source 1..20: mol_type = other DNA
gccaggagtttgagaccagc

SEQ ID NO: 276742 - DNA, 20 bp, synthetic construct
  source 1..20: mol_type = other DNA
ggccaggagtttgagaccag

SEQ ID NO: 276743 - DNA, 20 bp, synthetic construct
  source 1..20: mol_type = other DNA
aggccaggagtttgagacca

SEQ ID NO: 276744 - DNA, 20 bp, synthetic construct
  source 1..20: mol_type = other DNA
gaggccaggagtttgagacc

SEQ ID NO: 276745 - DNA, 20 bp, synthetic construct
  source 1..20: mol_type = other DNA
tgaggccaggagtttgagac

SEQ ID NO: 276746 - DNA, 20 bp, synthetic construct
  source 1..20: mol_type = other DNA
ctgaggccaggagtttgaga

SEQ ID NO: 276747 - DNA, 20 bp, synthetic construct
  source 1..20: mol_type = other DNA
cctgaggccaggagtttgag

SEQ ID NO: 276748 - DNA, 20 bp, synthetic construct
  source 1..20: mol_type = other DNA
acctgaggccaggagtttga

SEQ ID NO: 276749 - DNA, 20 bp, synthetic construct
  source 1..20: mol_type = other DNA
cacctgaggccaggagtttg

SEQ ID NO: 276750 - DNA, 20 bp, synthetic construct
  source 1..20: mol_type = other DNA
tcacctgaggccaggagttt

SEQ ID NO: 276751 - DNA, 20 bp, synthetic construct
  source 1..20: mol_type = other DNA
atcacctgaggccaggagtt

SEQ ID NO: 276752 - DNA, 20 bp, synthetic construct
  source 1..20: mol_type = other DNA
gatcacctgaggccaggagt

SEQ ID NO: 276753 - DNA, 20 bp, synthetic construct
  source 1..20: mol_type = other DNA
agatcacctgaggccaggag

SEQ ID NO: 276754 - DNA, 20 bp, synthetic construct
  source 1..20: mol_type = other DNA
cagatcacctgaggccagga

SEQ ID NO: 276755 - DNA, 20 bp, synthetic construct
  source 1..20: mol_type = other DNA
gcagatcacctgaggccagg

SEQ ID NO: 276756 - DNA, 20 bp, synthetic construct
  source 1..20: mol_type = other DNA
ggcagatcacctgaggccag

SEQ ID NO: 276757 - DNA, 20 bp, synthetic construct
  source 1..20: mol_type = other DNA
aggcagatcacctgaggcca

SEQ ID NO: 276758 - DNA, 20 bp, synthetic construct
  source 1..20: mol_type = other DNA
taggcagatcacctgaggcc

SEQ ID NO: 276759 - DNA, 20 bp, synthetic construct
  source 1..20: mol_type = other DNA
gtaggcagatcacctgaggc

SEQ ID NO: 276760 - DNA, 20 bp, synthetic construct
  source 1..20: mol_type = other DNA
ggtaggcagatcacctgagg

SEQ ID NO: 276761 - DNA, 20 bp, synthetic construct
  source 1..20: mol_type = other DNA
aggtaggcagatcacctgag

SEQ ID NO: 276762 - DNA, 20 bp, synthetic construct
  source 1..20: mol_type = other DNA
aaggtaggcagatcacctga

SEQ ID NO: 276763 - DNA, 20 bp, synthetic construct
  source 1..20: mol_type = other DNA
caaggtaggcagatcacctg

SEQ ID NO: 276764 - DNA, 20 bp, synthetic construct
  source 1..20: mol_type = other DNA
ccaaggtaggcagatcacct

SEQ ID NO: 276765 - DNA, 20 bp, synthetic construct
  source 1..20: mol_type = other DNA
accaaggtaggcagatcacc

SEQ ID NO: 276766 - DNA, 20 bp, synthetic construct
  source 1..20: mol_type = other DNA
gaccaaggtaggcagatcac

SEQ ID NO: 276767 - DNA, 20 bp, synthetic construct
  source 1..20: mol_type = other DNA
agaccaaggtaggcagatca

SEQ ID NO: 276768 - DNA, 20 bp, synthetic construct
  source 1..20: mol_type = other DNA
gagaccaaggtaggcagatc

SEQ ID NO: 276769 - DNA, 20 bp, synthetic construct
  source 1..20: mol_type = other DNA
ggagaccaaggtaggcagat

SEQ ID NO: 276770 - DNA, 20 bp, synthetic construct
  source 1..20: mol_type = other DNA
gggagaccaaggtaggcaga

SEQ ID NO: 276771 - DNA, 20 bp, synthetic construct
  source 1..20: mol_type = other DNA
tgggagaccaaggtaggcag

SEQ ID NO: 276772 - DNA, 20 bp, synthetic construct
  source 1..20: mol_type = other DNA
ttgggagaccaaggtaggca

SEQ ID NO: 276773 - DNA, 20 bp, synthetic construct
  source 1..20: mol_type = other DNA
tttgggagaccaaggtaggc

SEQ ID NO: 276774 - DNA, 20 bp, synthetic construct
  source 1..20: mol_type = other DNA
ctttgggagaccaaggtagg

SEQ ID NO: 276775 - DNA, 20 bp, synthetic construct
  source 1..20: mol_type = other DNA
actttgggagaccaaggtag

SEQ ID NO: 276776 - DNA, 20 bp, synthetic construct
  source 1..20: mol_type = other DNA
cactttgggagaccaaggta

SEQ ID NO: 276777 - DNA, 20 bp, synthetic construct
  source 1..20: mol_type = other DNA
gcactttgggagaccaaggt

SEQ ID NO: 276778 - DNA, 20 bp, synthetic construct
  source 1..20: mol_type = other DNA
agcactttgggagaccaagg

SEQ ID NO: 276779 - DNA, 20 bp, synthetic construct
  source 1..20: mol_type = other DNA
cagcactttgggagaccaag

SEQ ID NO: 276780 - DNA, 20 bp, synthetic construct
  source 1..20: mol_type = other DNA
ccagcactttgggagaccaa

SEQ ID NO: 276781 - DNA, 20 bp, synthetic construct
  source 1..20: mol_type = other DNA
cccagcactttgggagacca

SEQ ID NO: 276782 - DNA, 20 bp, synthetic construct
  source 1..20: mol_type = other DNA
tcccagcactttgggagacc

SEQ ID NO: 276783 - DNA, 20 bp, synthetic construct
  source 1..20: mol_type = other DNA
atcccagcactttgggagac

SEQ ID NO: 276784 - DNA, 20 bp, synthetic construct
  source 1..20: mol_type = other DNA
aatcccagcactttgggaga

SEQ ID NO: 276785 - DNA, 20 bp, synthetic construct
  source 1..20: mol_type = other DNA
taatcccagcactttgggag

SEQ ID NO: 276786 - DNA, 20 bp, synthetic construct
  source 1..20: mol_type = other DNA
gtaatcccagcactttggga

SEQ ID NO: 276787 - DNA, 20 bp, synthetic construct
  source 1..20: mol_type = other DNA
tgtaatcccagcactttggg

SEQ ID NO: 276788 - DNA, 20 bp, synthetic construct
  source 1..20: mol_type = other DNA
ctgtaatcccagcactttgg

SEQ ID NO: 276789 - DNA, 20 bp, synthetic construct
  source 1..20: mol_type = other DNA
cctgtaatcccagcactttg

SEQ ID NO: 276790 - DNA, 20 bp, synthetic construct
  source 1..20: mol_type = other DNA
acctgtaatcccagcacttt

SEQ ID NO: 276791 - DNA, 20 bp, synthetic construct
  source 1..20: mol_type = other DNA
cacctgtaatcccagcactt

SEQ ID NO: 276792 - DNA, 20 bp, synthetic construct
  source 1..20: mol_type = other DNA
acacctgtaatcccagcact

SEQ ID NO: 276793 - DNA, 20 bp, synthetic construct
  source 1..20: mol_type = other DNA
cacacctgtaatcccagcac

SEQ ID NO: 276794 - DNA, 20 bp, synthetic construct
  source 1..20: mol_type = other DNA
tcacacctgtaatcccagca

SEQ ID NO: 276795 - DNA, 20 bp, synthetic construct
  source 1..20: mol_type = other DNA
ctcacacctgtaatcccagc

SEQ ID NO: 276796 - DNA, 20 bp, synthetic construct
  source 1..20: mol_type = other DNA
gctcacacctgtaatcccag

SEQ ID NO: 276797 - DNA, 20 bp, synthetic construct
  source 1..20: mol_type = other DNA
ggctcacacctgtaatccca

SEQ ID NO: 276798 - DNA, 20 bp, synthetic construct
  source 1..20: mol_type = other DNA
tggctcacacctgtaatccc

SEQ ID NO: 276799 - DNA, 20 bp, synthetic construct
  source 1..20: mol_type = other DNA
gtggctcacacctgtaatcc

SEQ ID NO: 276800 - DNA, 20 bp, synthetic construct
  source 1..20: mol_type = other DNA
ggtggctcacacctgtaatc

SEQ ID NO: 276801 - DNA, 20 bp, synthetic construct
  source 1..20: mol_type = other DNA
tggtggctcacacctgtaat

SEQ ID NO: 276802 - DNA, 20 bp, synthetic construct
  source 1..20: mol_type = other DNA
gtggtggctcacacctgtaa

SEQ ID NO: 276803 - DNA, 20 bp, synthetic construct
  source 1..20: mol_type = other DNA
cgtggtggctcacacctgta

SEQ ID NO: 276804 - DNA, 20 bp, synthetic construct
  source 1..20: mol_type = other DNA
gcgtggtggctcacacctgt

SEQ ID NO: 276805 - DNA, 20 bp, synthetic construct
  source 1..20: mol_type = other DNA
ggcgtggtggctcacacctg

SEQ ID NO: 276806 - DNA, 20 bp, synthetic construct
  source 1..20: mol_type = other DNA
aggcgtggtggctcacacct

SEQ ID NO: 276807 - DNA, 20 bp, synthetic construct
  source 1..20: mol_type = other DNA
caggcgtggtggctcacacc

SEQ ID NO: 276808 - DNA, 20 bp, synthetic construct
  source 1..20: mol_type = other DNA
gcaggcgtggtggctcacac

SEQ ID NO: 276809 - DNA, 20 bp, synthetic construct
  source 1..20: mol_type = other DNA
ggcaggcgtggtggctcaca

SEQ ID NO: 276810 - DNA, 20 bp, synthetic construct
  source 1..20: mol_type = other DNA
gggcaggcgtggtggctcac

SEQ ID NO: 276811 - DNA, 20 bp, synthetic construct
  source 1..20: mol_type = other DNA
agggcaggcgtggtggctca

SEQ ID NO: 276812 - DNA, 20 bp, synthetic construct
  source 1..20: mol_type = other DNA
aagggcaggcgtggtggctc

SEQ ID NO: 276813 - DNA, 20 bp, synthetic construct
  source 1..20: mol_type = other DNA
taagggcaggcgtggtggct

SEQ ID NO: 276814 - DNA, 20 bp, synthetic construct
  source 1..20: mol_type = other DNA
ttaagggcaggcgtggtggc

SEQ ID NO: 276815 - DNA, 20 bp, synthetic construct
  source 1..20: mol_type = other DNA
tttaagggcaggcgtggtgg

SEQ ID NO: 276816 - DNA, 20 bp, synthetic construct
  source 1..20: mol_type = other DNA
ttttaagggcaggcgtggtg

SEQ ID NO: 276817 - DNA, 20 bp, synthetic construct
  source 1..20: mol_type = other DNA
tttttaagggcaggcgtggt

SEQ ID NO: 276818 - DNA, 20 bp, synthetic construct
  source 1..20: mol_type = other DNA
atttttaagggcaggcgtgg

SEQ ID NO: 276819 - DNA, 20 bp, synthetic construct
  source 1..20: mol_type = other DNA
tatttttaagggcaggcgtg

SEQ ID NO: 276820 - DNA, 20 bp, synthetic construct
  source 1..20: mol_type = other DNA
gtatttttaagggcaggcgt

SEQ ID NO: 276821 - DNA, 20 bp, synthetic construct
  source 1..20: mol_type = other DNA
tgtatttttaagggcaggcg

SEQ ID NO: 276822 - DNA, 20 bp, synthetic construct
  source 1..20: mol_type = other DNA
atgtatttttaagggcaggc

SEQ ID NO: 276823 - DNA, 20 bp, synthetic construct
  source 1..20: mol_type = other DNA
aatgtatttttaagggcagg

SEQ ID NO: 276824 - DNA, 20 bp, synthetic construct
  source 1..20: mol_type = other DNA
taatgtatttttaagggcag

SEQ ID NO: 276825 - DNA, 20 bp, synthetic construct
  source 1..20: mol_type = other DNA
ataatgtatttttaagggca

SEQ ID NO: 276826 - DNA, 20 bp, synthetic construct
  source 1..20: mol_type = other DNA
tataatgtatttttaagggc

SEQ ID NO: 276827 - DNA, 20 bp, synthetic construct
  source 1..20: mol_type = other DNA
atataatgtatttttaaggg

SEQ ID NO: 276828 - DNA, 20 bp, synthetic construct
  source 1..20: mol_type = other DNA
aatataatgtatttttaagg

SEQ ID NO: 276829 - DNA, 20 bp, synthetic construct
  source 1..20: mol_type = other DNA
aaatataatgtatttttaag

SEQ ID NO: 276830 - DNA, 20 bp, synthetic construct
  source 1..20: mol_type = other DNA
taaatataatgtatttttaa

SEQ ID NO: 276831 - DNA, 20 bp, synthetic construct
  source 1..20: mol_type = other DNA
ttaaatataatgtattttta

SEQ ID NO: 276832 - DNA, 20 bp, synthetic construct
  source 1..20: mol_type = other DNA
attaaatataatgtattttt

SEQ ID NO: 276833 - DNA, 20 bp, synthetic construct
  source 1..20: mol_type = other DNA
tattaaatataatgtatttt

SEQ ID NO: 276834 - DNA, 20 bp, synthetic construct
  source 1..20: mol_type = other DNA
ctattaaatataatgtattt

SEQ ID NO: 276835 - DNA, 20 bp, synthetic construct
  source 1..20: mol_type = other DNA
gctattaaatataatgtatt

SEQ ID NO: 276836 - DNA, 20 bp, synthetic construct
  source 1..20: mol_type = other DNA
tgctattaaatataatgtat

SEQ ID NO: 276837 - DNA, 20 bp, synthetic construct
  source 1..20: mol_type = other DNA
ttgctattaaatataatgta

SEQ ID NO: 276838 - DNA, 20 bp, synthetic construct
  source 1..20: mol_type = other DNA
tttgctattaaatataatgt

SEQ ID NO: 276839 - DNA, 20 bp, synthetic construct
  source 1..20: mol_type = other DNA
ctttgctattaaatataatg

SEQ ID NO: 276840 - DNA, 20 bp, synthetic construct
  source 1..20: mol_type = other DNA
gctttgctattaaatataat

SEQ ID NO: 276841 - DNA, 20 bp, synthetic construct
  source 1..20: mol_type = other DNA
ggctttgctattaaatataa

SEQ ID NO: 276842 - DNA, 20 bp, synthetic construct
  source 1..20: mol_type = other DNA
gggctttgctattaaatata

SEQ ID NO: 276843 - DNA, 20 bp, synthetic construct
  source 1..20: mol_type = other DNA
ggggctttgctattaaatat

SEQ ID NO: 276844 - DNA, 20 bp, synthetic construct
  source 1..20: mol_type = other DNA
tggggctttgctattaaata

SEQ ID NO: 276845 - DNA, 20 bp, synthetic construct
  source 1..20: mol_type = other DNA
ctggggctttgctattaaat

SEQ ID NO: 276846 - DNA, 20 bp, synthetic construct
  source 1..20: mol_type = other DNA
actggggctttgctattaaa

SEQ ID NO: 276847 - DNA, 20 bp, synthetic construct
  source 1..20: mol_type = other DNA
aactggggctttgctattaa

SEQ ID NO: 276848 - DNA, 20 bp, synthetic construct
  source 1..20: mol_type = other DNA
caactggggctttgctatta

SEQ ID NO: 276849 - DNA, 20 bp, synthetic construct
  source 1..20: mol_type = other DNA
acaactggggctttgctatt

SEQ ID NO: 276850 - DNA, 20 bp, synthetic construct
  source 1..20: mol_type = other DNA
gacaactggggctttgctat

SEQ ID NO: 276851 - DNA, 20 bp, synthetic construct
  source 1..20: mol_type = other DNA
tgacaactggggctttgcta

SEQ ID NO: 276852 - DNA, 20 bp, synthetic construct
  source 1..20: mol_type = other DNA
gtgacaactggggctttgct

SEQ ID NO: 276853 - DNA, 20 bp, synthetic construct
  source 1..20: mol_type = other DNA
agtgacaactggggctttgc

SEQ ID NO: 276854 - DNA, 20 bp, synthetic construct
  source 1..20: mol_type = other DNA
aagtgacaactggggctttg

SEQ ID NO: 276855 - DNA, 20 bp, synthetic construct
  source 1..20: mol_type = other DNA
aaagtgacaactggggcttt

SEQ ID NO: 276856 - DNA, 20 bp, synthetic construct
  source 1..20: mol_type = other DNA
taaagtgacaactggggctt

SEQ ID NO: 276857 - DNA, 20 bp, synthetic construct
  source 1..20: mol_type = other DNA
ttaaagtgacaactggggct

SEQ ID NO: 276858 - DNA, 20 bp, synthetic construct
  source 1..20: mol_type = other DNA
tttaaagtgacaactggggc

SEQ ID NO: 276859 - DNA, 20 bp, synthetic construct
  source 1..20: mol_type = other DNA
ttttaaagtgacaactgggg

SEQ ID NO: 276860 - DNA, 20 bp, synthetic construct
  source 1..20: mol_type = other DNA
tttttaaagtgacaactggg

SEQ ID NO: 276861 - DNA, 20 bp, synthetic construct
  source 1..20: mol_type = other DNA
ctttttaaagtgacaactgg

SEQ ID NO: 276862 - DNA, 20 bp, synthetic construct
  source 1..20: mol_type = other DNA
gctttttaaagtgacaactg

SEQ ID NO: 276863 - DNA, 20 bp, synthetic construct
  source 1..20: mol_type = other DNA
tgctttttaaagtgacaact

SEQ ID NO: 276864 - DNA, 20 bp, synthetic construct
  source 1..20: mol_type = other DNA
atgctttttaaagtgacaac

SEQ ID NO: 276865 - DNA, 20 bp, synthetic construct
  source 1..20: mol_type = other DNA
gatgctttttaaagtgacaa

SEQ ID NO: 276866 - DNA, 20 bp, synthetic construct
  source 1..20: mol_type = other DNA
agatgctttttaaagtgaca

SEQ ID NO: 276867 - DNA, 20 bp, synthetic construct
  source 1..20: mol_type = other DNA
tagatgctttttaaagtgac

SEQ ID NO: 276868 - DNA, 20 bp, synthetic construct
  source 1..20: mol_type = other DNA
atagatgctttttaaagtga

SEQ ID NO: 276869 - DNA, 20 bp, synthetic construct
  source 1..20: mol_type = other DNA
catagatgctttttaaagtg

SEQ ID NO: 276870 - DNA, 20 bp, synthetic construct
  source 1..20: mol_type = other DNA
acatagatgctttttaaagt

SEQ ID NO: 276871 - DNA, 20 bp, synthetic construct
  source 1..20: mol_type = other DNA
tacatagatgctttttaaag

SEQ ID NO: 276872 - DNA, 20 bp, synthetic construct
  source 1..20: mol_type = other DNA
ctacatagatgctttttaaa

SEQ ID NO: 276873 - DNA, 20 bp, synthetic construct
  source 1..20: mol_type = other DNA
tctacatagatgctttttaa

SEQ ID NO: 276874 - DNA, 20 bp, synthetic construct
  source 1..20: mol_type = other DNA
ttctacatagatgcttttta

SEQ ID NO: 276875 - DNA, 20 bp, synthetic construct
  source 1..20: mol_type = other DNA
gttctacatagatgcttttt

SEQ ID NO: 276876 - DNA, 20 bp, synthetic construct
  source 1..20: mol_type = other DNA
tgttctacatagatgctttt

SEQ ID NO: 276877 - DNA, 20 bp, synthetic construct
  source 1..20: mol_type = other DNA
atgttctacatagatgcttt

SEQ ID NO: 276878 - DNA, 20 bp, synthetic construct
  source 1..20: mol_type = other DNA
aatgttctacatagatgctt

SEQ ID NO: 276879 - DNA, 20 bp, synthetic construct
  source 1..20: mol_type = other DNA
aaatgttctacatagatgct

SEQ ID NO: 276880 - DNA, 20 bp, synthetic construct
  source 1..20: mol_type = other DNA
taaatgttctacatagatgc

SEQ ID NO: 276881 - DNA, 20 bp, synthetic construct
  source 1..20: mol_type = other DNA
ataaatgttctacatagatg

SEQ ID NO: 276882 - DNA, 20 bp, synthetic construct
  source 1..20: mol_type = other DNA
cataaatgttctacatagat

SEQ ID NO: 276883 - DNA, 20 bp, synthetic construct
  source 1..20: mol_type = other DNA
acataaatgttctacataga

SEQ ID NO: 276884 - DNA, 20 bp, synthetic construct
  source 1..20: mol_type = other DNA
cacataaatgttctacatag

SEQ ID NO: 276885 - DNA, 20 bp, synthetic construct
  source 1..20: mol_type = other DNA
ccacataaatgttctacata

SEQ ID NO: 276886 - DNA, 20 bp, synthetic construct
  source 1..20: mol_type = other DNA
tccacataaatgttctacat

SEQ ID NO: 276887 - DNA, 20 bp, synthetic construct
  source 1..20: mol_type = other DNA
ttccacataaatgttctaca

SEQ ID NO: 276888 - DNA, 20 bp, synthetic construct
  source 1..20: mol_type = other DNA
attccacataaatgttctac

SEQ ID NO: 276889 - DNA, 20 bp, synthetic construct
  source 1..20: mol_type = other DNA
tattccacataaatgttcta

SEQ ID NO: 276890 - DNA, 20 bp, synthetic construct
  source 1..20: mol_type = other DNA
ttattccacataaatgttct

SEQ ID NO: 276891 - DNA, 20 bp, synthetic construct
  source 1..20: mol_type = other DNA
tttattccacataaatgttc

SEQ ID NO: 276892 - DNA, 20 bp, synthetic construct
  source 1..20: mol_type = other DNA
atttattccacataaatgtt

SEQ ID NO: 276893 - DNA, 20 bp, synthetic construct
  source 1..20: mol_type = other DNA
tatttattccacataaatgt

SEQ ID NO: 276894 - DNA, 20 bp, synthetic construct
  source 1..20: mol_type = other DNA
gtatttattccacataaatg

SEQ ID NO: 276895 - DNA, 20 bp, synthetic construct
  source 1..20: mol_type = other DNA
tgtatttattccacataaat

SEQ ID NO: 276896 - DNA, 20 bp, synthetic construct
  source 1..20: mol_type = other DNA
ctgtatttattccacataaa

SEQ ID NO: 276897 - DNA, 20 bp, synthetic construct
  source 1..20: mol_type = other DNA
actgtatttattccacataa

SEQ ID NO: 276898 - DNA, 20 bp, synthetic construct
  source 1..20: mol_type = other DNA
cactgtatttattccacata

SEQ ID NO: 276899 - DNA, 20 bp, synthetic construct
  source 1..20: mol_type = other DNA
tcactgtatttattccacat

SEQ ID NO: 276900 - DNA, 20 bp, synthetic construct
  source 1..20: mol_type = other DNA
ttcactgtatttattccaca

SEQ ID NO: 276901 - DNA, 20 bp, synthetic construct
  source 1..20: mol_type = other DNA
attcactgtatttattccac

SEQ ID NO: 276902 - DNA, 20 bp, synthetic construct
  source 1..20: mol_type = other DNA
aattcactgtatttattcca

SEQ ID NO: 276903 - DNA, 20 bp, synthetic construct
  source 1..20: mol_type = other DNA
aaattcactgtatttattcc

SEQ ID NO: 276904 - DNA, 20 bp, synthetic construct
  source 1..20: mol_type = other DNA
caaattcactgtatttattc

SEQ ID NO: 276905 - DNA, 20 bp, synthetic construct
  source 1..20: mol_type = other DNA
acaaattcactgtatttatt

SEQ ID NO: 276906 - DNA, 20 bp, synthetic construct
  source 1..20: mol_type = other DNA
tacaaattcactgtatttat

SEQ ID NO: 276907 - DNA, 20 bp, synthetic construct
  source 1..20: mol_type = other DNA
gtacaaattcactgtattta

SEQ ID NO: 276908 - DNA, 20 bp, synthetic construct
  source 1..20: mol_type = other DNA
cgtacaaattcactgtattt

SEQ ID NO: 276909 - DNA, 20 bp, synthetic construct
  source 1..20: mol_type = other DNA
acgtacaaattcactgtatt

SEQ ID NO: 276910 - DNA, 20 bp, synthetic construct
  source 1..20: mol_type = other DNA
cacgtacaaattcactgtat

SEQ ID NO: 276911 - DNA, 20 bp, synthetic construct
  source 1..20: mol_type = other DNA
ccacgtacaaattcactgta

SEQ ID NO: 276912 - DNA, 20 bp, synthetic construct
  source 1..20: mol_type = other DNA
tccacgtacaaattcactgt

SEQ ID NO: 276913 - DNA, 20 bp, synthetic construct
  source 1..20: mol_type = other DNA
ttccacgtacaaattcactg

SEQ ID NO: 276914 - DNA, 20 bp, synthetic construct
  source 1..20: mol_type = other DNA
attccacgtacaaattcact

SEQ ID NO: 276915 - DNA, 20 bp, synthetic construct
  source 1..20: mol_type = other DNA
gattccacgtacaaattcac

SEQ ID NO: 276916 - DNA, 20 bp, synthetic construct
  source 1..20: mol_type = other DNA
cgattccacgtacaaattca

SEQ ID NO: 276917 - DNA, 20 bp, synthetic construct
  source 1..20: mol_type = other DNA
acgattccacgtacaaattc

SEQ ID NO: 276918 - DNA, 20 bp, synthetic construct
  source 1..20: mol_type = other DNA
aacgattccacgtacaaatt

SEQ ID NO: 276919 - DNA, 20 bp, synthetic construct
  source 1..20: mol_type = other DNA
aaacgattccacgtacaaat

SEQ ID NO: 276920 - DNA, 20 bp, synthetic construct
  source 1..20: mol_type = other DNA
caaacgattccacgtacaaa

SEQ ID NO: 276921 - DNA, 20 bp, synthetic construct
  source 1..20: mol_type = other DNA
gcaaacgattccacgtacaa

SEQ ID NO: 276922 - DNA, 20 bp, synthetic construct
  source 1..20: mol_type = other DNA
ggcaaacgattccacgtaca

SEQ ID NO: 276923 - DNA, 20 bp, synthetic construct
  source 1..20: mol_type = other DNA
aggcaaacgattccacgtac

SEQ ID NO: 276924 - DNA, 20 bp, synthetic construct
  source 1..20: mol_type = other DNA
gaggcaaacgattccacgta

SEQ ID NO: 276925 - DNA, 20 bp, synthetic construct
  source 1..20: mol_type = other DNA
agaggcaaacgattccacgt

SEQ ID NO: 276926 - DNA, 20 bp, synthetic construct
  source 1..20: mol_type = other DNA
gagaggcaaacgattccacg

SEQ ID NO: 276927 - DNA, 20 bp, synthetic construct
  source 1..20: mol_type = other DNA
ggagaggcaaacgattccac

SEQ ID NO: 276928 - DNA, 20 bp, synthetic construct
  source 1..20: mol_type = other DNA
aggagaggcaaacgattcca

SEQ ID NO: 276929 - DNA, 20 bp, synthetic construct
  source 1..20: mol_type = other DNA
gaggagaggcaaacgattcc

SEQ ID NO: 276930 - DNA, 20 bp, synthetic construct
  source 1..20: mol_type = other DNA
tgaggagaggcaaacgattc

SEQ ID NO: 276931 - DNA, 20 bp, synthetic construct
  source 1..20: mol_type = other DNA
ttgaggagaggcaaacgatt

SEQ ID NO: 276932 - DNA, 20 bp, synthetic construct
  source 1..20: mol_type = other DNA
attgaggagaggcaaacgat

SEQ ID NO: 276933 - DNA, 20 bp, synthetic construct
  source 1..20: mol_type = other DNA
gattgaggagaggcaaacga

SEQ ID NO: 276934 - DNA, 20 bp, synthetic construct
  source 1..20: mol_type = other DNA
tgattgaggagaggcaaacg

SEQ ID NO: 276935 - DNA, 20 bp, synthetic construct
  source 1..20: mol_type = other DNA
ctgattgaggagaggcaaac

SEQ ID NO: 276936 - DNA, 20 bp, synthetic construct
  source 1..20: mol_type = other DNA
cctgattgaggagaggcaaa

SEQ ID NO: 276937 - DNA, 20 bp, synthetic construct
  source 1..20: mol_type = other DNA
ccctgattgaggagaggcaa

SEQ ID NO: 276938 - DNA, 20 bp, synthetic construct
  source 1..20: mol_type = other DNA
gccctgattgaggagaggca

SEQ ID NO: 276939 - DNA, 20 bp, synthetic construct
  source 1..20: mol_type = other DNA
ggccctgattgaggagaggc

SEQ ID NO: 276940 - DNA, 20 bp, synthetic construct
  source 1..20: mol_type = other DNA
tggccctgattgaggagagg

SEQ ID NO: 276941 - DNA, 20 bp, synthetic construct
  source 1..20: mol_type = other DNA
ctggccctgattgaggagag

SEQ ID NO: 276942 - DNA, 20 bp, synthetic construct
  source 1..20: mol_type = other DNA
cctggccctgattgaggaga

SEQ ID NO: 276943 - DNA, 20 bp, synthetic construct
  source 1..20: mol_type = other DNA
ccctggccctgattgaggag

SEQ ID NO: 276944 - DNA, 20 bp, synthetic construct
  source 1..20: mol_type = other DNA
tccctggccctgattgagga

SEQ ID NO: 276945 - DNA, 20 bp, synthetic construct
  source 1..20: mol_type = other DNA
atccctggccctgattgagg

SEQ ID NO: 276946 - DNA, 20 bp, synthetic construct
  source 1..20: mol_type = other DNA
catccctggccctgattgag

SEQ ID NO: 276947 - DNA, 20 bp, synthetic construct
  source 1..20: mol_type = other DNA
gcatccctggccctgattga

SEQ ID NO: 276948 - DNA, 20 bp, synthetic construct
  source 1..20: mol_type = other DNA
tgcatccctggccctgattg

SEQ ID NO: 276949 - DNA, 20 bp, synthetic construct
  source 1..20: mol_type = other DNA
ctgcatccctggccctgatt

SEQ ID NO: 276950 - DNA, 20 bp, synthetic construct
  source 1..20: mol_type = other DNA
cctgcatccctggccctgat

SEQ ID NO: 276951 - DNA, 20 bp, synthetic construct
  source 1..20: mol_type = other DNA
acctgcatccctggccctga

SEQ ID NO: 276952 - DNA, 20 bp, synthetic construct
  source 1..20: mol_type = other DNA
cacctgcatccctggccctg

SEQ ID NO: 276953 - DNA, 20 bp, synthetic construct
  source 1..20: mol_type = other DNA
tcacctgcatccctggccct

SEQ ID NO: 276954 - DNA, 20 bp, synthetic construct
  source 1..20: mol_type = other DNA
ctcacctgcatccctggccc

SEQ ID NO: 276955 - DNA, 20 bp, synthetic construct
  source 1..20: mol_type = other DNA
gctcacctgcatccctggcc

SEQ ID NO: 276956 - DNA, 20 bp, synthetic construct
  source 1..20: mol_type = other DNA
agctcacctgcatccctggc

SEQ ID NO: 276957 - DNA, 20 bp, synthetic construct
  source 1..20: mol_type = other DNA
aagctcacctgcatccctgg

SEQ ID NO: 276958 - DNA, 20 bp, synthetic construct
  source 1..20: mol_type = other DNA
caagctcacctgcatccctg

SEQ ID NO: 276959 - DNA, 20 bp, synthetic construct
  source 1..20: mol_type = other DNA
ccaagctcacctgcatccct

SEQ ID NO: 276960 - DNA, 20 bp, synthetic construct
  source 1..20: mol_type = other DNA
cccaagctcacctgcatccc

SEQ ID NO: 276961 - DNA, 20 bp, synthetic construct
  source 1..20: mol_type = other DNA
gcccaagctcacctgcatcc

SEQ ID NO: 276962 - DNA, 20 bp, synthetic construct
  source 1..20: mol_type = other DNA
agcccaagctcacctgcatc

SEQ ID NO: 276963 - DNA, 20 bp, synthetic construct
  source 1..20: mol_type = other DNA
cagcccaagctcacctgcat

SEQ ID NO: 276964 - DNA, 20 bp, synthetic construct
  source 1..20: mol_type = other DNA
tcagcccaagctcacctgca

SEQ ID NO: 276965 - DNA, 20 bp, synthetic construct
  source 1..20: mol_type = other DNA
ctcagcccaagctcacctgc

SEQ ID NO: 276966 - DNA, 20 bp, synthetic construct
  source 1..20: mol_type = other DNA
tctcagcccaagctcacctg

SEQ ID NO: 276967 - DNA, 20 bp, synthetic construct
  source 1..20: mol_type = other DNA
atctcagcccaagctcacct

SEQ ID NO: 276968 - DNA, 20 bp, synthetic construct
  source 1..20: mol_type = other DNA
catctcagcccaagctcacc

SEQ ID NO: 276969 - DNA, 20 bp, synthetic construct
  source 1..20: mol_type = other DNA
acatctcagcccaagctcac

SEQ ID NO: 276970 - DNA, 20 bp, synthetic construct
  source 1..20: mol_type = other DNA
gacatctcagcccaagctca

SEQ ID NO: 276971 - DNA, 20 bp, synthetic construct
  source 1..20: mol_type = other DNA
tgacatctcagcccaagctc

SEQ ID NO: 276972 - DNA, 20 bp, synthetic construct
  source 1..20: mol_type = other DNA
ctgacatctcagcccaagct

SEQ ID NO: 276973 - DNA, 20 bp, synthetic construct
  source 1..20: mol_type = other DNA
tctgacatctcagcccaagc

SEQ ID NO: 276974 - DNA, 20 bp, synthetic construct
  source 1..20: mol_type = other DNA
gtctgacatctcagcccaag

SEQ ID NO: 276975 - DNA, 20 bp, synthetic construct
  source 1..20: mol_type = other DNA
ggtctgacatctcagcccaa

SEQ ID NO: 276976 - DNA, 20 bp, synthetic construct
  source 1..20: mol_type = other DNA
gggtctgacatctcagccca

SEQ ID NO: 276977 - DNA, 20 bp, synthetic construct
  source 1..20: mol_type = other DNA
ggggtctgacatctcagccc

SEQ ID NO: 276978 - DNA, 20 bp, synthetic construct
  source 1..20: mol_type = other DNA
tggggtctgacatctcagcc

SEQ ID NO: 276979 - DNA, 20 bp, synthetic construct
  source 1..20: mol_type = other DNA
gtggggtctgacatctcagc

SEQ ID NO: 276980 - DNA, 20 bp, synthetic construct
  source 1..20: mol_type = other DNA
tgtggggtctgacatctcag

SEQ ID NO: 276981 - DNA, 20 bp, synthetic construct
  source 1..20: mol_type = other DNA
ctgtggggtctgacatctca

SEQ ID NO: 276982 - DNA, 20 bp, synthetic construct
  source 1..20: mol_type = other DNA
actgtggggtctgacatctc

SEQ ID NO: 276983 - DNA, 20 bp, synthetic construct
  source 1..20: mol_type = other DNA
tactgtggggtctgacatct

SEQ ID NO: 276984 - DNA, 20 bp, synthetic construct
  source 1..20: mol_type = other DNA
ttactgtggggtctgacatc

SEQ ID NO: 276985 - DNA, 20 bp, synthetic construct
  source 1..20: mol_type = other DNA
cttactgtggggtctgacat

SEQ ID NO: 276986 - DNA, 20 bp, synthetic construct
  source 1..20: mol_type = other DNA
acttactgtggggtctgaca

SEQ ID NO: 276987 - DNA, 20 bp, synthetic construct
  source 1..20: mol_type = other DNA
cacttactgtggggtctgac

SEQ ID NO: 276988 - DNA, 20 bp, synthetic construct
  source 1..20: mol_type = other DNA
ccacttactgtggggtctga

SEQ ID NO: 276989 - DNA, 20 bp, synthetic construct
  source 1..20: mol_type = other DNA
cccacttactgtggggtctg

SEQ ID NO: 276990 - DNA, 20 bp, synthetic construct
  source 1..20: mol_type = other DNA
ccccacttactgtggggtct

SEQ ID NO: 276991 - DNA, 20 bp, synthetic construct
  source 1..20: mol_type = other DNA
cccccacttactgtggggtc

SEQ ID NO: 276992 - DNA, 20 bp, synthetic construct
  source 1..20: mol_type = other DNA
ccccccacttactgtggggt

SEQ ID NO: 276993 - DNA, 20 bp, synthetic construct
  source 1..20: mol_type = other DNA
gccccccacttactgtgggg

SEQ ID NO: 276994 - DNA, 20 bp, synthetic construct
  source 1..20: mol_type = other DNA
tgccccccacttactgtggg

SEQ ID NO: 276995 - DNA, 20 bp, synthetic construct
  source 1..20: mol_type = other DNA
ctgccccccacttactgtgg

SEQ ID NO: 276996 - DNA, 20 bp, synthetic construct
  source 1..20: mol_type = other DNA
tctgccccccacttactgtg

SEQ ID NO: 276997 - DNA, 20 bp, synthetic construct
  source 1..20: mol_type = other DNA
ctctgccccccacttactgt

SEQ ID NO: 276998 - DNA, 20 bp, synthetic construct
  source 1..20: mol_type = other DNA
gctctgccccccacttactg

SEQ ID NO: 276999 - DNA, 20 bp, synthetic construct
  source 1..20: mol_type = other DNA
ggctctgccccccacttact

SEQ ID NO: 277000 - DNA, 20 bp, synthetic construct
  source 1..20: mol_type = other DNA
tggctctgccccccacttac

SEQ ID NO: 277001 - DNA, 20 bp, synthetic construct
  source 1..20: mol_type = other DNA
ctggctctgccccccactta

SEQ ID NO: 277002 - DNA, 20 bp, synthetic construct
  source 1..20: mol_type = other DNA
cctggctctgccccccactt

SEQ ID NO: 277003 - DNA, 20 bp, synthetic construct
  source 1..20: mol_type = other DNA
gcctggctctgccccccact

SEQ ID NO: 277004 - DNA, 20 bp, synthetic construct
  source 1..20: mol_type = other DNA
agcctggctctgccccccac

SEQ ID NO: 277005 - DNA, 20 bp, synthetic construct
  source 1..20: mol_type = other DNA
cagcctggctctgcccccca

SEQ ID NO: 277006 - DNA, 20 bp, synthetic construct
  source 1..20: mol_type = other DNA
ccagcctggctctgcccccc

SEQ ID NO: 277007 - DNA, 20 bp, synthetic construct
  source 1..20: mol_type = other DNA
cccagcctggctctgccccc

SEQ ID NO: 277008 - DNA, 20 bp, synthetic construct
  source 1..20: mol_type = other DNA
tcccagcctggctctgcccc

SEQ ID NO: 277009 - DNA, 20 bp, synthetic construct
  source 1..20: mol_type = other DNA
gtcccagcctggctctgccc

SEQ ID NO: 277010 - DNA, 20 bp, synthetic construct
  source 1..20: mol_type = other DNA
ggtcccagcctggctctgcc

SEQ ID NO: 277011 - DNA, 20 bp, synthetic construct
  source 1..20: mol_type = other DNA
gggtcccagcctggctctgc

SEQ ID NO: 277012 - DNA, 20 bp, synthetic construct
  source 1..20: mol_type = other DNA
agggtcccagcctggctctg

SEQ ID NO: 277013 - DNA, 20 bp, synthetic construct
  source 1..20: mol_type = other DNA
gagggtcccagcctggctct

SEQ ID NO: 277014 - DNA, 20 bp, synthetic construct
  source 1..20: mol_type = other DNA
ggagggtcccagcctggctc

SEQ ID NO: 277015 - DNA, 20 bp, synthetic construct
  source 1..20: mol_type = other DNA
aggagggtcccagcctggct

SEQ ID NO: 277016 - DNA, 20 bp, synthetic construct
  source 1..20: mol_type = other DNA
gaggagggtcccagcctggc

SEQ ID NO: 277017 - DNA, 20 bp, synthetic construct
  source 1..20: mol_type = other DNA
agaggagggtcccagcctgg

SEQ ID NO: 277018 - DNA, 20 bp, synthetic construct
  source 1..20: mol_type = other DNA
tagaggagggtcccagcctg

SEQ ID NO: 277019 - DNA, 20 bp, synthetic construct
  source 1..20: mol_type = other DNA
ctagaggagggtcccagcct

SEQ ID NO: 277020 - DNA, 20 bp, synthetic construct
  source 1..20: mol_type = other DNA
cctagaggagggtcccagcc

SEQ ID NO: 277021 - DNA, 20 bp, synthetic construct
  source 1..20: mol_type = other DNA
tcctagaggagggtcccagc

SEQ ID NO: 277022 - DNA, 20 bp, synthetic construct
  source 1..20: mol_type = other DNA
gtcctagaggagggtcccag

SEQ ID NO: 277023 - DNA, 20 bp, synthetic construct
  source 1..20: mol_type = other DNA
tgtcctagaggagggtccca

SEQ ID NO: 277024 - DNA, 20 bp, synthetic construct
  source 1..20: mol_type = other DNA
ctgtcctagaggagggtccc

SEQ ID NO: 277025 - DNA, 20 bp, synthetic construct
  source 1..20: mol_type = other DNA
gctgtcctagaggagggtcc

SEQ ID NO: 277026 - DNA, 20 bp, synthetic construct
  source 1..20: mol_type = other DNA
agctgtcctagaggagggtc

SEQ ID NO: 277027 - DNA, 20 bp, synthetic construct
  source 1..20: mol_type = other DNA
gagctgtcctagaggagggt

SEQ ID NO: 277028 - DNA, 20 bp, synthetic construct
  source 1..20: mol_type = other DNA
agagctgtcctagaggaggg

SEQ ID NO: 277029 - DNA, 20 bp, synthetic construct
  source 1..20: mol_type = other DNA
cagagctgtcctagaggagg

SEQ ID NO: 277030 - DNA, 20 bp, synthetic construct
  source 1..20: mol_type = other DNA
acagagctgtcctagaggag

SEQ ID NO: 277031 - DNA, 20 bp, synthetic construct
  source 1..20: mol_type = other DNA
tacagagctgtcctagagga

SEQ ID NO: 277032 - DNA, 20 bp, synthetic construct
  source 1..20: mol_type = other DNA
ttacagagctgtcctagagg

SEQ ID NO: 277033 - DNA, 20 bp, synthetic construct
  source 1..20: mol_type = other DNA
gttacagagctgtcctagag

SEQ ID NO: 277034 - DNA, 20 bp, synthetic construct
  source 1..20: mol_type = other DNA
agttacagagctgtcctaga

SEQ ID NO: 277035 - DNA, 20 bp, synthetic construct
  source 1..20: mol_type = other DNA
gagttacagagctgtcctag

SEQ ID NO: 277036 - DNA, 20 bp, synthetic construct
  source 1..20: mol_type = other DNA
agagttacagagctgtccta

SEQ ID NO: 277037 - DNA, 20 bp, synthetic construct
  source 1..20: mol_type = other DNA
cagagttacagagctgtcct

SEQ ID NO: 277038 - DNA, 20 bp, synthetic construct
  source 1..20: mol_type = other DNA
tcagagttacagagctgtcc

SEQ ID NO: 277039 - DNA, 20 bp, synthetic construct
  source 1..20: mol_type = other DNA
ctcagagttacagagctgtc

SEQ ID NO: 277040 - DNA, 20 bp, synthetic construct
  source 1..20: mol_type = other DNA
tctcagagttacagagctgt

SEQ ID NO: 277041 - DNA, 20 bp, synthetic construct
  source 1..20: mol_type = other DNA
gtctcagagttacagagctg

SEQ ID NO: 277042 - DNA, 20 bp, synthetic construct
  source 1..20: mol_type = other DNA
ggtctcagagttacagagct

SEQ ID NO: 277043 - DNA, 20 bp, synthetic construct
  source 1..20: mol_type = other DNA
gggtctcagagttacagagc

SEQ ID NO: 277044 - DNA, 20 bp, synthetic construct
  source 1..20: mol_type = other DNA
agggtctcagagttacagag

SEQ ID NO: 277045 - DNA, 20 bp, synthetic construct
  source 1..20: mol_type = other DNA
gagggtctcagagttacaga

SEQ ID NO: 277046 - DNA, 20 bp, synthetic construct
  source 1..20: mol_type = other DNA
ggagggtctcagagttacag

SEQ ID NO: 277047 - DNA, 20 bp, synthetic construct
  source 1..20: mol_type = other DNA
tggagggtctcagagttaca

SEQ ID NO: 277048 - DNA, 20 bp, synthetic construct
  source 1..20: mol_type = other DNA
ctggagggtctcagagttac

SEQ ID NO: 277049 - DNA, 20 bp, synthetic construct
  source 1..20: mol_type = other DNA
cctggagggtctcagagtta

SEQ ID NO: 277050 - DNA, 20 bp, synthetic construct
  source 1..20: mol_type = other DNA
gcctggagggtctcagagtt

SEQ ID NO: 277051 - DNA, 20 bp, synthetic construct
  source 1..20: mol_type = other DNA
tgcctggagggtctcagagt

SEQ ID NO: 277052 - DNA, 20 bp, synthetic construct
  source 1..20: mol_type = other DNA
atgcctggagggtctcagag

SEQ ID NO: 277053 - DNA, 20 bp, synthetic construct
  source 1..20: mol_type = other DNA
gatgcctggagggtctcaga

SEQ ID NO: 277054 - DNA, 20 bp, synthetic construct
  source 1..20: mol_type = other DNA
agatgcctggagggtctcag

SEQ ID NO: 277055 - DNA, 20 bp, synthetic construct
  source 1..20: mol_type = other DNA
aagatgcctggagggtctca

SEQ ID NO: 277056 - DNA, 20 bp, synthetic construct
  source 1..20: mol_type = other DNA
aaagatgcctggagggtctc

SEQ ID NO: 277057 - DNA, 20 bp, synthetic construct
  source 1..20: mol_type = other DNA
aaaagatgcctggagggtct

SEQ ID NO: 277058 - DNA, 20 bp, synthetic construct
  source 1..20: mol_type = other DNA
gaaaagatgcctggagggtc

SEQ ID NO: 277059 - DNA, 20 bp, synthetic construct
  source 1..20: mol_type = other DNA
ggaaaagatgcctggagggt

SEQ ID NO: 277060 - DNA, 20 bp, synthetic construct
  source 1..20: mol_type = other DNA
aggaaaagatgcctggaggg

SEQ ID NO: 277061 - DNA, 20 bp, synthetic construct
  source 1..20: mol_type = other DNA
caggaaaagatgcctggagg

SEQ ID NO: 277062 - DNA, 20 bp, synthetic construct
  source 1..20: mol_type = other DNA
acaggaaaagatgcctggag

SEQ ID NO: 277063 - DNA, 20 bp, synthetic construct
  source 1..20: mol_type = other DNA
tacaggaaaagatgcctgga

SEQ ID NO: 277064 - DNA, 20 bp, synthetic construct
  source 1..20: mol_type = other DNA
gtacaggaaaagatgcctgg

SEQ ID NO: 277065 - DNA, 20 bp, synthetic construct
  source 1..20: mol_type = other DNA
ggtacaggaaaagatgcctg

SEQ ID NO: 277066 - DNA, 20 bp, synthetic construct
  source 1..20: mol_type = other DNA
aggtacaggaaaagatgcct

SEQ ID NO: 277067 - DNA, 20 bp, synthetic construct
  source 1..20: mol_type = other DNA
gaggtacaggaaaagatgcc

SEQ ID NO: 277068 - DNA, 20 bp, synthetic construct
  source 1..20: mol_type = other DNA
tgaggtacaggaaaagatgc

SEQ ID NO: 277069 - DNA, 20 bp, synthetic construct
  source 1..20: mol_type = other DNA
ctgaggtacaggaaaagatg

SEQ ID NO: 277070 - DNA, 20 bp, synthetic construct
  source 1..20: mol_type = other DNA
actgaggtacaggaaaagat

SEQ ID NO: 277071 - DNA, 20 bp, synthetic construct
  source 1..20: mol_type = other DNA
cactgaggtacaggaaaaga

SEQ ID NO: 277072 - DNA, 20 bp, synthetic construct
  source 1..20: mol_type = other DNA
gcactgaggtacaggaaaag

SEQ ID NO: 277073 - DNA, 20 bp, synthetic construct
  source 1..20: mol_type = other DNA
agcactgaggtacaggaaaa

SEQ ID NO: 277074 - DNA, 20 bp, synthetic construct
  source 1..20: mol_type = other DNA
aagcactgaggtacaggaaa

SEQ ID NO: 277075 - DNA, 20 bp, synthetic construct
  source 1..20: mol_type = other DNA
gaagcactgaggtacaggaa

SEQ ID NO: 277076 - DNA, 20 bp, synthetic construct
  source 1..20: mol_type = other DNA
agaagcactgaggtacagga

SEQ ID NO: 277077 - DNA, 20 bp, synthetic construct
  source 1..20: mol_type = other DNA
cagaagcactgaggtacagg

SEQ ID NO: 277078 - DNA, 20 bp, synthetic construct
  source 1..20: mol_type = other DNA
tcagaagcactgaggtacag

SEQ ID NO: 277079 - DNA, 20 bp, synthetic construct
  source 1..20: mol_type = other DNA
ttcagaagcactgaggtaca

SEQ ID NO: 277080 - DNA, 20 bp, synthetic construct
  source 1..20: mol_type = other DNA
tttcagaagcactgaggtac

SEQ ID NO: 277081 - DNA, 20 bp, synthetic construct
  source 1..20: mol_type = other DNA
ttttcagaagcactgaggta

SEQ ID NO: 277082 - DNA, 20 bp, synthetic construct
  source 1..20: mol_type = other DNA
tttttcagaagcactgaggt

SEQ ID NO: 277083 - DNA, 20 bp, synthetic construct
  source 1..20: mol_type = other DNA
atttttcagaagcactgagg

SEQ ID NO: 277084 - DNA, 20 bp, synthetic construct
  source 1..20: mol_type = other DNA
gatttttcagaagcactgag

SEQ ID NO: 277085 - DNA, 20 bp, synthetic construct
  source 1..20: mol_type = other DNA
agatttttcagaagcactga

SEQ ID NO: 277086 - DNA, 20 bp, synthetic construct
  source 1..20: mol_type = other DNA
cagatttttcagaagcactg

SEQ ID NO: 277087 - DNA, 20 bp, synthetic construct
  source 1..20: mol_type = other DNA
acagatttttcagaagcact

SEQ ID NO: 277088 - DNA, 20 bp, synthetic construct
  source 1..20: mol_type = other DNA
cacagatttttcagaagcac

SEQ ID NO: 277089 - DNA, 20 bp, synthetic construct
  source 1..20: mol_type = other DNA
acacagatttttcagaagca

SEQ ID NO: 277090 - DNA, 20 bp, synthetic construct
  source 1..20: mol_type = other DNA
cacacagatttttcagaagc

SEQ ID NO: 277091 - DNA, 20 bp, synthetic construct
  source 1..20: mol_type = other DNA
tcacacagatttttcagaag

SEQ ID NO: 277092 - DNA, 20 bp, synthetic construct
  source 1..20: mol_type = other DNA
ttcacacagatttttcagaa

SEQ ID NO: 277093 - DNA, 20 bp, synthetic construct
  source 1..20: mol_type = other DNA
attcacacagatttttcaga

SEQ ID NO: 277094 - DNA, 20 bp, synthetic construct
  source 1..20: mol_type = other DNA
gattcacacagatttttcag

SEQ ID NO: 277095 - DNA, 20 bp, synthetic construct
  source 1..20: mol_type = other DNA
tgattcacacagatttttca

SEQ ID NO: 277096 - DNA, 20 bp, synthetic construct
  source 1..20: mol_type = other DNA
ttgattcacacagatttttc

SEQ ID NO: 277097 - DNA, 20 bp, synthetic construct
  source 1..20: mol_type = other DNA
tttgattcacacagattttt

SEQ ID NO: 277098 - DNA, 20 bp, synthetic construct
  source 1..20: mol_type = other DNA
atttgattcacacagatttt

SEQ ID NO: 277099 - DNA, 20 bp, synthetic construct
  source 1..20: mol_type = other DNA
gatttgattcacacagattt

SEQ ID NO: 277100 - DNA, 20 bp, synthetic construct
  source 1..20: mol_type = other DNA
tgatttgattcacacagatt

SEQ ID NO: 277101 - DNA, 20 bp, synthetic construct
  source 1..20: mol_type = other DNA
atgatttgattcacacagat

SEQ ID NO: 277102 - DNA, 20 bp, synthetic construct
  source 1..20: mol_type = other DNA
aatgatttgattcacacaga

SEQ ID NO: 277103 - DNA, 20 bp, synthetic construct
  source 1..20: mol_type = other DNA
aaatgatttgattcacacag

SEQ ID NO: 277104 - DNA, 20 bp, synthetic construct
  source 1..20: mol_type = other DNA
aaaatgatttgattcacaca

SEQ ID NO: 277105 - DNA, 20 bp, synthetic construct
  source 1..20: mol_type = other DNA
taaaatgatttgattcacac

SEQ ID NO: 277106 - DNA, 20 bp, synthetic construct
  source 1..20: mol_type = other DNA
ttaaaatgatttgattcaca

SEQ ID NO: 277107 - DNA, 20 bp, synthetic construct
  source 1..20: mol_type = other DNA
tttaaaatgatttgattcac

SEQ ID NO: 277108 - DNA, 20 bp, synthetic construct
  source 1..20: mol_type = other DNA
ctttaaaatgatttgattca

SEQ ID NO: 277109 - DNA, 20 bp, synthetic construct
  source 1..20: mol_type = other DNA
cctttaaaatgatttgattc

SEQ ID NO: 277110 - DNA, 20 bp, synthetic construct
  source 1..20: mol_type = other DNA
tcctttaaaatgatttgatt

SEQ ID NO: 277111 - DNA, 20 bp, synthetic construct
  source 1..20: mol_type = other DNA
ctcctttaaaatgatttgat

SEQ ID NO: 277112 - DNA, 20 bp, synthetic construct
  source 1..20: mol_type = other DNA
gctcctttaaaatgatttga

SEQ ID NO: 277113 - DNA, 20 bp, synthetic construct
  source 1..20: mol_type = other DNA
agctcctttaaaatgatttg

SEQ ID NO: 277114 - DNA, 20 bp, synthetic construct
  source 1..20: mol_type = other DNA
aagctcctttaaaatgattt

SEQ ID NO: 277115 - DNA, 20 bp, synthetic construct
  source 1..20: mol_type = other DNA
caagctcctttaaaatgatt

SEQ ID NO: 277116 - DNA, 20 bp, synthetic construct
  source 1..20: mol_type = other DNA
ccaagctcctttaaaatgat

SEQ ID NO: 277117 - DNA, 20 bp, synthetic construct
  source 1..20: mol_type = other DNA
cccaagctcctttaaaatga

SEQ ID NO: 277118 - DNA, 20 bp, synthetic construct
  source 1..20: mol_type = other DNA
acccaagctcctttaaaatg

SEQ ID NO: 277119 - DNA, 20 bp, synthetic construct
  source 1..20: mol_type = other DNA
aacccaagctcctttaaaat

SEQ ID NO: 277120 - DNA, 20 bp, synthetic construct
  source 1..20: mol_type = other DNA
gaacccaagctcctttaaaa

SEQ ID NO: 277121 - DNA, 20 bp, synthetic construct
  source 1..20: mol_type = other DNA
tgaacccaagctcctttaaa

SEQ ID NO: 277122 - DNA, 20 bp, synthetic construct
  source 1..20: mol_type = other DNA
atgaacccaagctcctttaa

SEQ ID NO: 277123 - DNA, 20 bp, synthetic construct
  source 1..20: mol_type = other DNA
gatgaacccaagctccttta

SEQ ID NO: 277124 - DNA, 20 bp, synthetic construct
  source 1..20: mol_type = other DNA
tgatgaacccaagctccttt

SEQ ID NO: 277125 - DNA, 20 bp, synthetic construct
  source 1..20: mol_type = other DNA
gtgatgaacccaagctcctt

SEQ ID NO: 277126 - DNA, 20 bp, synthetic construct
  source 1..20: mol_type = other DNA
agtgatgaacccaagctcct

SEQ ID NO: 277127 - DNA, 20 bp, synthetic construct
  source 1..20: mol_type = other DNA
cagtgatgaacccaagctcc

SEQ ID NO: 277128 - DNA, 20 bp, synthetic construct
  source 1..20: mol_type = other DNA
acagtgatgaacccaagctc

SEQ ID NO: 277129 - DNA, 20 bp, synthetic construct
  source 1..20: mol_type = other DNA
aacagtgatgaacccaagct

SEQ ID NO: 277130 - DNA, 20 bp, synthetic construct
  source 1..20: mol_type = other DNA
aaacagtgatgaacccaagc

SEQ ID NO: 277131 - DNA, 20 bp, synthetic construct
  source 1..20: mol_type = other DNA
taaacagtgatgaacccaag

SEQ ID NO: 277132 - DNA, 20 bp, synthetic construct
  source 1..20: mol_type = other DNA
ttaaacagtgatgaacccaa

SEQ ID NO: 277133 - DNA, 20 bp, synthetic construct
  source 1..20: mol_type = other DNA
tttaaacagtgatgaaccca

SEQ ID NO: 277134 - DNA, 20 bp, synthetic construct
  source 1..20: mol_type = other DNA
ctttaaacagtgatgaaccc

SEQ ID NO: 277135 - DNA, 20 bp, synthetic construct
  source 1..20: mol_type = other DNA
cctttaaacagtgatgaacc

SEQ ID NO: 277136 - DNA, 20 bp, synthetic construct
  source 1..20: mol_type = other DNA
tcctttaaacagtgatgaac

SEQ ID NO: 277137 - DNA, 20 bp, synthetic construct
  source 1..20: mol_type = other DNA
gtcctttaaacagtgatgaa

SEQ ID NO: 277138 - DNA, 20 bp, synthetic construct
  source 1..20: mol_type = other DNA
tgtcctttaaacagtgatga

SEQ ID NO: 277139 - DNA, 20 bp, synthetic construct
  source 1..20: mol_type = other DNA
ctgtcctttaaacagtgatg

SEQ ID NO: 277140 - DNA, 20 bp, synthetic construct
  source 1..20: mol_type = other DNA
actgtcctttaaacagtgat

SEQ ID NO: 277141 - DNA, 20 bp, synthetic construct
  source 1..20: mol_type = other DNA
cactgtcctttaaacagtga

SEQ ID NO: 277142 - DNA, 20 bp, synthetic construct
  source 1..20: mol_type = other DNA
acactgtcctttaaacagtg

SEQ ID NO: 277143 - DNA, 20 bp, synthetic construct
  source 1..20: mol_type = other DNA
tacactgtcctttaaacagt

SEQ ID NO: 277144 - DNA, 20 bp, synthetic construct
  source 1..20: mol_type = other DNA
ttacactgtcctttaaacag

SEQ ID NO: 277145 - DNA, 20 bp, synthetic construct
  source 1..20: mol_type = other DNA
tttacactgtcctttaaaca

SEQ ID NO: 277146 - DNA, 20 bp, synthetic construct
  source 1..20: mol_type = other DNA
atttacactgtcctttaaac

SEQ ID NO: 277147 - DNA, 20 bp, synthetic construct
  source 1..20: mol_type = other DNA
tatttacactgtcctttaaa

SEQ ID NO: 277148 - DNA, 20 bp, synthetic construct
  source 1..20: mol_type = other DNA
ttatttacactgtcctttaa

SEQ ID NO: 277149 - DNA, 20 bp, synthetic construct
  source 1..20: mol_type = other DNA
attatttacactgtccttta

SEQ ID NO: 277150 - DNA, 20 bp, synthetic construct
  source 1..20: mol_type = other DNA
aattatttacactgtccttt

SEQ ID NO: 277151 - DNA, 20 bp, synthetic construct
  source 1..20: mol_type = other DNA
gaattatttacactgtcctt

SEQ ID NO: 277152 - DNA, 20 bp, synthetic construct
  source 1..20: mol_type = other DNA
agaattatttacactgtcct

SEQ ID NO: 277153 - DNA, 20 bp, synthetic construct
  source 1..20: mol_type = other DNA
cagaattatttacactgtcc

SEQ ID NO: 277154 - DNA, 20 bp, synthetic construct
  source 1..20: mol_type = other DNA
tcagaattatttacactgtc

SEQ ID NO: 277155 - DNA, 20 bp, synthetic construct
  source 1..20: mol_type = other DNA
ttcagaattatttacactgt

SEQ ID NO: 277156 - DNA, 20 bp, synthetic construct
  source 1..20: mol_type = other DNA
cttcagaattatttacactg

SEQ ID NO: 277157 - DNA, 20 bp, synthetic construct
  source 1..20: mol_type = other DNA
ccttcagaattatttacact

SEQ ID NO: 277158 - DNA, 20 bp, synthetic construct
  source 1..20: mol_type = other DNA
accttcagaattatttacac

SEQ ID NO: 277159 - DNA, 20 bp, synthetic construct
  source 1..20: mol_type = other DNA
caccttcagaattatttaca

SEQ ID NO: 277160 - DNA, 20 bp, synthetic construct
  source 1..20: mol_type = other DNA
tcaccttcagaattatttac

SEQ ID NO: 277161 - DNA, 20 bp, synthetic construct
  source 1..20: mol_type = other DNA
gtcaccttcagaattattta

SEQ ID NO: 277162 - DNA, 20 bp, synthetic construct
  source 1..20: mol_type = other DNA
agtcaccttcagaattattt

SEQ ID NO: 277163 - DNA, 20 bp, synthetic construct
  source 1..20: mol_type = other DNA
gagtcaccttcagaattatt

SEQ ID NO: 277164 - DNA, 20 bp, synthetic construct
  source 1..20: mol_type = other DNA
agagtcaccttcagaattat

SEQ ID NO: 277165 - DNA, 20 bp, synthetic construct
  source 1..20: mol_type = other DNA
tagagtcaccttcagaatta

SEQ ID NO: 277166 - DNA, 20 bp, synthetic construct
  source 1..20: mol_type = other DNA
gtagagtcaccttcagaatt

SEQ ID NO: 277167 - DNA, 20 bp, synthetic construct
  source 1..20: mol_type = other DNA
ggtagagtcaccttcagaat

SEQ ID NO: 277168 - DNA, 20 bp, synthetic construct
  source 1..20: mol_type = other DNA
gggtagagtcaccttcagaa

SEQ ID NO: 277169 - DNA, 20 bp, synthetic construct
  source 1..20: mol_type = other DNA
agggtagagtcaccttcaga

SEQ ID NO: 277170 - DNA, 20 bp, synthetic construct
  source 1..20: mol_type = other DNA
cagggtagagtcaccttcag

SEQ ID NO: 277171 - DNA, 20 bp, synthetic construct
  source 1..20: mol_type = other DNA
acagggtagagtcaccttca

SEQ ID NO: 277172 - DNA, 20 bp, synthetic construct
  source 1..20: mol_type = other DNA
aacagggtagagtcaccttc

SEQ ID NO: 277173 - DNA, 20 bp, synthetic construct
  source 1..20: mol_type = other DNA
taacagggtagagtcacctt

SEQ ID NO: 277174 - DNA, 20 bp, synthetic construct
  source 1..20: mol_type = other DNA
ataacagggtagagtcacct

SEQ ID NO: 277175 - DNA, 20 bp, synthetic construct
  source 1..20: mol_type = other DNA
aataacagggtagagtcacc

SEQ ID NO: 277176 - DNA, 20 bp, synthetic construct
  source 1..20: mol_type = other DNA
aaataacagggtagagtcac

SEQ ID NO: 277177 - DNA, 20 bp, synthetic construct
  source 1..20: mol_type = other DNA
caaataacagggtagagtca

SEQ ID NO: 277178 - DNA, 20 bp, synthetic construct
  source 1..20: mol_type = other DNA
tcaaataacagggtagagtc

SEQ ID NO: 277179 - DNA, 20 bp, synthetic construct
  source 1..20: mol_type = other DNA
atcaaataacagggtagagt

SEQ ID NO: 277180 - DNA, 20 bp, synthetic construct
  source 1..20: mol_type = other DNA
gatcaaataacagggtagag

SEQ ID NO: 277181 - DNA, 20 bp, synthetic construct
  source 1..20: mol_type = other DNA
agatcaaataacagggtaga

SEQ ID NO: 277182 - DNA, 20 bp, synthetic construct
  source 1..20: mol_type = other DNA
gagatcaaataacagggtag

SEQ ID NO: 277183 - DNA, 20 bp, synthetic construct
  source 1..20: mol_type = other DNA
agagatcaaataacagggta

SEQ ID NO: 277184 - DNA, 20 bp, synthetic construct
  source 1..20: mol_type = other DNA
aagagatcaaataacagggt

SEQ ID NO: 277185 - DNA, 20 bp, synthetic construct
  source 1..20: mol_type = other DNA
gaagagatcaaataacaggg

SEQ ID NO: 277186 - DNA, 20 bp, synthetic construct
  source 1..20: mol_type = other DNA
agaagagatcaaataacagg

SEQ ID NO: 277187 - DNA, 20 bp, synthetic construct
  source 1..20: mol_type = other DNA
aagaagagatcaaataacag

SEQ ID NO: 277188 - DNA, 20 bp, synthetic construct
  source 1..20: mol_type = other DNA
aaagaagagatcaaataaca

SEQ ID NO: 277189 - DNA, 20 bp, synthetic construct
  source 1..20: mol_type = other DNA
caaagaagagatcaaataac

SEQ ID NO: 277190 - DNA, 20 bp, synthetic construct
  source 1..20: mol_type = other DNA
ccaaagaagagatcaaataa

SEQ ID NO: 277191 - DNA, 20 bp, synthetic construct
  source 1..20: mol_type = other DNA
gccaaagaagagatcaaata

SEQ ID NO: 277192 - DNA, 20 bp, synthetic construct
  source 1..20: mol_type = other DNA
ggccaaagaagagatcaaat

SEQ ID NO: 277193 - DNA, 20 bp, synthetic construct
  source 1..20: mol_type = other DNA
tggccaaagaagagatcaaa

SEQ ID NO: 277194 - DNA, 20 bp, synthetic construct
  source 1..20: mol_type = other DNA
ctggccaaagaagagatcaa

SEQ ID NO: 277195 - DNA, 20 bp, synthetic construct
  source 1..20: mol_type = other DNA
gctggccaaagaagagatca

SEQ ID NO: 277196 - DNA, 20 bp, synthetic construct
  source 1..20: mol_type = other DNA
agctggccaaagaagagatc

SEQ ID NO: 277197 - DNA, 20 bp, synthetic construct
  source 1..20: mol_type = other DNA
cagctggccaaagaagagat

SEQ ID NO: 277198 - DNA, 20 bp, synthetic construct
  source 1..20: mol_type = other DNA
tcagctggccaaagaagaga

SEQ ID NO: 277199 - DNA, 20 bp, synthetic construct
  source 1..20: mol_type = other DNA
gtcagctggccaaagaagag

SEQ ID NO: 277200 - DNA, 20 bp, synthetic construct
  source 1..20: mol_type = other DNA
agtcagctggccaaagaaga

SEQ ID NO: 277201 - DNA, 20 bp, synthetic construct
  source 1..20: mol_type = other DNA
aagtcagctggccaaagaag

SEQ ID NO: 277202 - DNA, 20 bp, synthetic construct
  source 1..20: mol_type = other DNA
taagtcagctggccaaagaa

SEQ ID NO: 277203 - DNA, 20 bp, synthetic construct
  source 1..20: mol_type = other DNA
ttaagtcagctggccaaaga

SEQ ID NO: 277204 - DNA, 20 bp, synthetic construct
  source 1..20: mol_type = other DNA
gttaagtcagctggccaaag

SEQ ID NO: 277205 - DNA, 20 bp, synthetic construct
  source 1..20: mol_type = other DNA
tgttaagtcagctggccaaa

SEQ ID NO: 277206 - DNA, 20 bp, synthetic construct
  source 1..20: mol_type = other DNA
ctgttaagtcagctggccaa

SEQ ID NO: 277207 - DNA, 20 bp, synthetic construct
  source 1..20: mol_type = other DNA
cctgttaagtcagctggcca

SEQ ID NO: 277208 - DNA, 20 bp, synthetic construct
  source 1..20: mol_type = other DNA
tcctgttaagtcagctggcc

SEQ ID NO: 277209 - DNA, 20 bp, synthetic construct
  source 1..20: mol_type = other DNA
gtcctgttaagtcagctggc

SEQ ID NO: 277210 - DNA, 20 bp, synthetic construct
  source 1..20: mol_type = other DNA
tgtcctgttaagtcagctgg

SEQ ID NO: 277211 - DNA, 20 bp, synthetic construct
  source 1..20: mol_type = other DNA
atgtcctgttaagtcagctg

SEQ ID NO: 277212 - DNA, 20 bp, synthetic construct
  source 1..20: mol_type = other DNA
tatgtcctgttaagtcagct

SEQ ID NO: 277213 - DNA, 20 bp, synthetic construct
  source 1..20: mol_type = other DNA
ctatgtcctgttaagtcagc

SEQ ID NO: 277214 - DNA, 20 bp, synthetic construct
  source 1..20: mol_type = other DNA
tctatgtcctgttaagtcag

SEQ ID NO: 277215 - DNA, 20 bp, synthetic construct
  source 1..20: mol_type = other DNA
gtctatgtcctgttaagtca

SEQ ID NO: 277216 - DNA, 20 bp, synthetic construct
  source 1..20: mol_type = other DNA
tgtctatgtcctgttaagtc

SEQ ID NO: 277217 - DNA, 20 bp, synthetic construct
  source 1..20: mol_type = other DNA
ctgtctatgtcctgttaagt

SEQ ID NO: 277218 - DNA, 20 bp, synthetic construct
  source 1..20: mol_type = other DNA
cctgtctatgtcctgttaag

SEQ ID NO: 277219 - DNA, 20 bp, synthetic construct
  source 1..20: mol_type = other DNA
acctgtctatgtcctgttaa

SEQ ID NO: 277220 - DNA, 20 bp, synthetic construct
  source 1..20: mol_type = other DNA
aacctgtctatgtcctgtta

SEQ ID NO: 277221 - DNA, 20 bp, synthetic construct
  source 1..20: mol_type = other DNA
aaacctgtctatgtcctgtt

SEQ ID NO: 277222 - DNA, 20 bp, synthetic construct
  source 1..20: mol_type = other DNA
aaaacctgtctatgtcctgt

SEQ ID NO: 277223 - DNA, 20 bp, synthetic construct
  source 1..20: mol_type = other DNA
gaaaacctgtctatgtcctg

SEQ ID NO: 277224 - DNA, 20 bp, synthetic construct
  source 1..20: mol_type = other DNA
ggaaaacctgtctatgtcct

SEQ ID NO: 277225 - DNA, 20 bp, synthetic construct
  source 1..20: mol_type = other DNA
aggaaaacctgtctatgtcc

SEQ ID NO: 277226 - DNA, 20 bp, synthetic construct
  source 1..20: mol_type = other DNA
caggaaaacctgtctatgtc

SEQ ID NO: 277227 - DNA, 20 bp, synthetic construct
  source 1..20: mol_type = other DNA
acaggaaaacctgtctatgt

SEQ ID NO: 277228 - DNA, 20 bp, synthetic construct
  source 1..20: mol_type = other DNA
cacaggaaaacctgtctatg

SEQ ID NO: 277229 - DNA, 20 bp, synthetic construct
  source 1..20: mol_type = other DNA
acacaggaaaacctgtctat

SEQ ID NO: 277230 - DNA, 20 bp, synthetic construct
  source 1..20: mol_type = other DNA
gacacaggaaaacctgtcta

SEQ ID NO: 277231 - DNA, 20 bp, synthetic construct
  source 1..20: mol_type = other DNA
tgacacaggaaaacctgtct

SEQ ID NO: 277232 - DNA, 20 bp, synthetic construct
  source 1..20: mol_type = other DNA
ctgacacaggaaaacctgtc

SEQ ID NO: 277233 - DNA, 20 bp, synthetic construct
  source 1..20: mol_type = other DNA
actgacacaggaaaacctgt

SEQ ID NO: 277234 - DNA, 20 bp, synthetic construct
  source 1..20: mol_type = other DNA
aactgacacaggaaaacctg

SEQ ID NO: 277235 - DNA, 20 bp, synthetic construct
  source 1..20: mol_type = other DNA
gaactgacacaggaaaacct

SEQ ID NO: 277236 - DNA, 20 bp, synthetic construct
  source 1..20: mol_type = other DNA
ggaactgacacaggaaaacc

SEQ ID NO: 277237 - DNA, 20 bp, synthetic construct
  source 1..20: mol_type = other DNA
aggaactgacacaggaaaac

SEQ ID NO: 277238 - DNA, 20 bp, synthetic construct
  source 1..20: mol_type = other DNA
taggaactgacacaggaaaa

SEQ ID NO: 277239 - DNA, 20 bp, synthetic construct
  source 1..20: mol_type = other DNA
ttaggaactgacacaggaaa

SEQ ID NO: 277240 - DNA, 20 bp, synthetic construct
  source 1..20: mol_type = other DNA
cttaggaactgacacaggaa

SEQ ID NO: 277241 - DNA, 20 bp, synthetic construct
  source 1..20: mol_type = other DNA
gcttaggaactgacacagga

SEQ ID NO: 277242 - DNA, 20 bp, synthetic construct
  source 1..20: mol_type = other DNA
agcttaggaactgacacagg

SEQ ID NO: 277243 - DNA, 20 bp, synthetic construct
  source 1..20: mol_type = other DNA
cagcttaggaactgacacag

SEQ ID NO: 277244 - DNA, 20 bp, synthetic construct
  source 1..20: mol_type = other DNA
tcagcttaggaactgacaca

SEQ ID NO: 277245 - DNA, 20 bp, synthetic construct
  source 1..20: mol_type = other DNA
atcagcttaggaactgacac

SEQ ID NO: 277246 - DNA, 20 bp, synthetic construct
  source 1..20: mol_type = other DNA
gatcagcttaggaactgaca

SEQ ID NO: 277247 - DNA, 20 bp, synthetic construct
  source 1..20: mol_type = other DNA
tgatcagcttaggaactgac

SEQ ID NO: 277248 - DNA, 20 bp, synthetic construct
  source 1..20: mol_type = other DNA
gtgatcagcttaggaactga

SEQ ID NO: 277249 - DNA, 20 bp, synthetic construct
  source 1..20: mol_type = other DNA
ggtgatcagcttaggaactg

SEQ ID NO: 277250 - DNA, 20 bp, synthetic construct
  source 1..20: mol_type = other DNA
aggtgatcagcttaggaact

SEQ ID NO: 277251 - DNA, 20 bp, synthetic construct
  source 1..20: mol_type = other DNA
aaggtgatcagcttaggaac

SEQ ID NO: 277252 - DNA, 20 bp, synthetic construct
  source 1..20: mol_type = other DNA
caaggtgatcagcttaggaa

SEQ ID NO: 277253 - DNA, 20 bp, synthetic construct
  source 1..20: mol_type = other DNA
ccaaggtgatcagcttagga

SEQ ID NO: 277254 - DNA, 20 bp, synthetic construct
  source 1..20: mol_type = other DNA
tccaaggtgatcagcttagg

SEQ ID NO: 277255 - DNA, 20 bp, synthetic construct
  source 1..20: mol_type = other DNA
gtccaaggtgatcagcttag

SEQ ID NO: 277256 - DNA, 20 bp, synthetic construct
  source 1..20: mol_type = other DNA
agtccaaggtgatcagctta

SEQ ID NO: 277257 - DNA, 20 bp, synthetic construct
  source 1..20: mol_type = other DNA
aagtccaaggtgatcagctt

SEQ ID NO: 277258 - DNA, 20 bp, synthetic construct
  source 1..20: mol_type = other DNA
caagtccaaggtgatcagct

SEQ ID NO: 277259 - DNA, 20 bp, synthetic construct
  source 1..20: mol_type = other DNA
tcaagtccaaggtgatcagc

SEQ ID NO: 277260 - DNA, 20 bp, synthetic construct
  source 1..20: mol_type = other DNA
ttcaagtccaaggtgatcag

SEQ ID NO: 277261 - DNA, 20 bp, synthetic construct
  source 1..20: mol_type = other DNA
cttcaagtccaaggtgatca

SEQ ID NO: 277262 - DNA, 20 bp, synthetic construct
  source 1..20: mol_type = other DNA
tcttcaagtccaaggtgatc

SEQ ID NO: 277263 - DNA, 20 bp, synthetic construct
  source 1..20: mol_type = other DNA
ctcttcaagtccaaggtgat

SEQ ID NO: 277264 - DNA, 20 bp, synthetic construct
  source 1..20: mol_type = other DNA
cctcttcaagtccaaggtga

SEQ ID NO: 277265 - DNA, 20 bp, synthetic construct
  source 1..20: mol_type = other DNA
tcctcttcaagtccaaggtg

SEQ ID NO: 277266 - DNA, 20 bp, synthetic construct
  source 1..20: mol_type = other DNA
ctcctcttcaagtccaaggt

SEQ ID NO: 277267 - DNA, 20 bp, synthetic construct
  source 1..20: mol_type = other DNA
cctcctcttcaagtccaagg

SEQ ID NO: 277268 - DNA, 20 bp, synthetic construct
  source 1..20: mol_type = other DNA
gcctcctcttcaagtccaag

SEQ ID NO: 277269 - DNA, 20 bp, synthetic construct
  source 1..20: mol_type = other DNA
agcctcctcttcaagtccaa

SEQ ID NO: 277270 - DNA, 20 bp, synthetic construct
  source 1..20: mol_type = other DNA
aagcctcctcttcaagtcca

SEQ ID NO: 277271 - DNA, 20 bp, synthetic construct
  source 1..20: mol_type = other DNA
caagcctcctcttcaagtcc

SEQ ID NO: 277272 - DNA, 20 bp, synthetic construct
  source 1..20: mol_type = other DNA
acaagcctcctcttcaagtc

SEQ ID NO: 277273 - DNA, 20 bp, synthetic construct
  source 1..20: mol_type = other DNA
cacaagcctcctcttcaagt

SEQ ID NO: 277274 - DNA, 20 bp, synthetic construct
  source 1..20: mol_type = other DNA
acacaagcctcctcttcaag

SEQ ID NO: 277275 - DNA, 20 bp, synthetic construct
  source 1..20: mol_type = other DNA
cacacaagcctcctcttcaa

SEQ ID NO: 277276 - DNA, 20 bp, synthetic construct
  source 1..20: mol_type = other DNA
ccacacaagcctcctcttca

SEQ ID NO: 277277 - DNA, 20 bp, synthetic construct
  source 1..20: mol_type = other DNA
cccacacaagcctcctcttc

SEQ ID NO: 277278 - DNA, 20 bp, synthetic construct
  source 1..20: mol_type = other DNA
gcccacacaagcctcctctt

SEQ ID NO: 277279 - DNA, 20 bp, synthetic construct
  source 1..20: mol_type = other DNA
tgcccacacaagcctcctct

SEQ ID NO: 277280 - DNA, 20 bp, synthetic construct
  source 1..20: mol_type = other DNA
atgcccacacaagcctcctc

SEQ ID NO: 277281 - DNA, 20 bp, synthetic construct
  source 1..20: mol_type = other DNA
gatgcccacacaagcctcct

SEQ ID NO: 277282 - DNA, 20 bp, synthetic construct
  source 1..20: mol_type = other DNA
ggatgcccacacaagcctcc

SEQ ID NO: 277283 - DNA, 20 bp, synthetic construct
  source 1..20: mol_type = other DNA
tggatgcccacacaagcctc

SEQ ID NO: 277284 - DNA, 20 bp, synthetic construct
  source 1..20: mol_type = other DNA
ctggatgcccacacaagcct

SEQ ID NO: 277285 - DNA, 20 bp, synthetic construct
  source 1..20: mol_type = other DNA
actggatgcccacacaagcc

SEQ ID NO: 277286 - DNA, 20 bp, synthetic construct
  source 1..20: mol_type = other DNA
cactggatgcccacacaagc

SEQ ID NO: 277287 - DNA, 20 bp, synthetic construct
  source 1..20: mol_type = other DNA
gcactggatgcccacacaag

SEQ ID NO: 277288 - DNA, 20 bp, synthetic construct
  source 1..20: mol_type = other DNA
ggcactggatgcccacacaa

SEQ ID NO: 277289 - DNA, 20 bp, synthetic construct
  source 1..20: mol_type = other DNA
gggcactggatgcccacaca

SEQ ID NO: 277290 - DNA, 20 bp, synthetic construct
  source 1..20: mol_type = other DNA
tgggcactggatgcccacac

SEQ ID NO: 277291 - DNA, 20 bp, synthetic construct
  source 1..20: mol_type = other DNA
gtgggcactggatgcccaca

SEQ ID NO: 277292 - DNA, 20 bp, synthetic construct
  source 1..20: mol_type = other DNA
ggtgggcactggatgcccac

SEQ ID NO: 277293 - DNA, 20 bp, synthetic construct
  source 1..20: mol_type = other DNA
gggtgggcactggatgccca

SEQ ID NO: 277294 - DNA, 20 bp, synthetic construct
  source 1..20: mol_type = other DNA
ggggtgggcactggatgccc

SEQ ID NO: 277295 - DNA, 20 bp, synthetic construct
  source 1..20: mol_type = other DNA
cggggtgggcactggatgcc

SEQ ID NO: 277296 - DNA, 20 bp, synthetic construct
  source 1..20: mol_type = other DNA
ccggggtgggcactggatgc

SEQ ID NO: 277297 - DNA, 20 bp, synthetic construct
  source 1..20: mol_type = other DNA
cccggggtgggcactggatg

SEQ ID NO: 277298 - DNA, 20 bp, synthetic construct
  source 1..20: mol_type = other DNA
acccggggtgggcactggat

SEQ ID NO: 277299 - DNA, 20 bp, synthetic construct
  source 1..20: mol_type = other DNA
aacccggggtgggcactgga

SEQ ID NO: 277300 - DNA, 20 bp, synthetic construct
  source 1..20: mol_type = other DNA
taacccggggtgggcactgg

SEQ ID NO: 277301 - DNA, 20 bp, synthetic construct
  source 1..20: mol_type = other DNA
ttaacccggggtgggcactg

SEQ ID NO: 277302 - DNA, 20 bp, synthetic construct
  source 1..20: mol_type = other DNA
tttaacccggggtgggcact

SEQ ID NO: 277303 - DNA, 20 bp, synthetic construct
  source 1..20: mol_type = other DNA
gtttaacccggggtgggcac

SEQ ID NO: 277304 - DNA, 20 bp, synthetic construct
  source 1..20: mol_type = other DNA
agtttaacccggggtgggca

SEQ ID NO: 277305 - DNA, 20 bp, synthetic construct
  source 1..20: mol_type = other DNA
gagtttaacccggggtgggc

SEQ ID NO: 277306 - DNA, 20 bp, synthetic construct
  source 1..20: mol_type = other DNA
ggagtttaacccggggtggg

SEQ ID NO: 277307 - DNA, 20 bp, synthetic construct
  source 1..20: mol_type = other DNA
gggagtttaacccggggtgg

SEQ ID NO: 277308 - DNA, 20 bp, synthetic construct
  source 1..20: mol_type = other DNA
tgggagtttaacccggggtg

SEQ ID NO: 277309 - DNA, 20 bp, synthetic construct
  source 1..20: mol_type = other DNA
ctgggagtttaacccggggt

SEQ ID NO: 277310 - DNA, 20 bp, synthetic construct
  source 1..20: mol_type = other DNA
gctgggagtttaacccgggg

SEQ ID NO: 277311 - DNA, 20 bp, synthetic construct
  source 1..20: mol_type = other DNA
tgctgggagtttaacccggg

SEQ ID NO: 277312 - DNA, 20 bp, synthetic construct
  source 1..20: mol_type = other DNA
ctgctgggagtttaacccgg

SEQ ID NO: 277313 - DNA, 20 bp, synthetic construct
  source 1..20: mol_type = other DNA
tctgctgggagtttaacccg

SEQ ID NO: 277314 - DNA, 20 bp, synthetic construct
  source 1..20: mol_type = other DNA
ctctgctgggagtttaaccc

SEQ ID NO: 277315 - DNA, 20 bp, synthetic construct
  source 1..20: mol_type = other DNA
actctgctgggagtttaacc

SEQ ID NO: 277316 - DNA, 20 bp, synthetic construct
  source 1..20: mol_type = other DNA
tactctgctgggagtttaac

SEQ ID NO: 277317 - DNA, 20 bp, synthetic construct
  source 1..20: mol_type = other DNA
atactctgctgggagtttaa

SEQ ID NO: 277318 - DNA, 20 bp, synthetic construct
  source 1..20: mol_type = other DNA
aatactctgctgggagttta

SEQ ID NO: 277319 - DNA, 20 bp, synthetic construct
  source 1..20: mol_type = other DNA
caatactctgctgggagttt

SEQ ID NO: 277320 - DNA, 20 bp, synthetic construct
  source 1..20: mol_type = other DNA
gcaatactctgctgggagtt

SEQ ID NO: 277321 - DNA, 20 bp, synthetic construct
  source 1..20: mol_type = other DNA
tgcaatactctgctgggagt

SEQ ID NO: 277322 - DNA, 20 bp, synthetic construct
  source 1..20: mol_type = other DNA
gtgcaatactctgctgggag

SEQ ID NO: 277323 - DNA, 20 bp, synthetic construct
  source 1..20: mol_type = other DNA
agtgcaatactctgctggga

SEQ ID NO: 277324 - DNA, 20 bp, synthetic construct
  source 1..20: mol_type = other DNA
cagtgcaatactctgctggg

SEQ ID NO: 277325 - DNA, 20 bp, synthetic construct
  source 1..20: mol_type = other DNA
ccagtgcaatactctgctgg

SEQ ID NO: 277326 - DNA, 20 bp, synthetic construct
  source 1..20: mol_type = other DNA
cccagtgcaatactctgctg

SEQ ID NO: 277327 - DNA, 20 bp, synthetic construct
  source 1..20: mol_type = other DNA
gcccagtgcaatactctgct

SEQ ID NO: 277328 - DNA, 20 bp, synthetic construct
  source 1..20: mol_type = other DNA
agcccagtgcaatactctgc

SEQ ID NO: 277329 - DNA, 20 bp, synthetic construct
  source 1..20: mol_type = other DNA
aagcccagtgcaatactctg

SEQ ID NO: 277330 - DNA, 20 bp, synthetic construct
  source 1..20: mol_type = other DNA
caagcccagtgcaatactct

SEQ ID NO: 277331 - DNA, 20 bp, synthetic construct
  source 1..20: mol_type = other DNA
gcaagcccagtgcaatactc

SEQ ID NO: 277332 - DNA, 20 bp, synthetic construct
  source 1..20: mol_type = other DNA
agcaagcccagtgcaatact

SEQ ID NO: 277333 - DNA, 20 bp, synthetic construct
  source 1..20: mol_type = other DNA
cagcaagcccagtgcaatac

SEQ ID NO: 277334 - DNA, 20 bp, synthetic construct
  source 1..20: mol_type = other DNA
tcagcaagcccagtgcaata

SEQ ID NO: 277335 - DNA, 20 bp, synthetic construct
  source 1..20: mol_type = other DNA
ctcagcaagcccagtgcaat

SEQ ID NO: 277336 - DNA, 20 bp, synthetic construct
  source 1..20: mol_type = other DNA
gctcagcaagcccagtgcaa

SEQ ID NO: 277337 - DNA, 20 bp, synthetic construct
  source 1..20: mol_type = other DNA
ggctcagcaagcccagtgca

SEQ ID NO: 277338 - DNA, 20 bp, synthetic construct
  source 1..20: mol_type = other DNA
aggctcagcaagcccagtgc

SEQ ID NO: 277339 - DNA, 20 bp, synthetic construct
  source 1..20: mol_type = other DNA
caggctcagcaagcccagtg

SEQ ID NO: 277340 - DNA, 20 bp, synthetic construct
  source 1..20: mol_type = other DNA
ccaggctcagcaagcccagt

SEQ ID NO: 277341 - DNA, 20 bp, synthetic construct
  source 1..20: mol_type = other DNA
accaggctcagcaagcccag

SEQ ID NO: 277342 - DNA, 20 bp, synthetic construct
  source 1..20: mol_type = other DNA
caccaggctcagcaagccca

SEQ ID NO: 277343 - DNA, 20 bp, synthetic construct
  source 1..20: mol_type = other DNA
tcaccaggctcagcaagccc

SEQ ID NO: 277344 - DNA, 20 bp, synthetic construct
  source 1..20: mol_type = other DNA
ctcaccaggctcagcaagcc

SEQ ID NO: 277345 - DNA, 20 bp, synthetic construct
  source 1..20: mol_type = other DNA
cctcaccaggctcagcaagc

SEQ ID NO: 277346 - DNA, 20 bp, synthetic construct
  source 1..20: mol_type = other DNA
gcctcaccaggctcagcaag

SEQ ID NO: 277347 - DNA, 20 bp, synthetic construct
  source 1..20: mol_type = other DNA
tgcctcaccaggctcagcaa

SEQ ID NO: 277348 - DNA, 20 bp, synthetic construct
  source 1..20: mol_type = other DNA
ttgcctcaccaggctcagca

SEQ ID NO: 277349 - DNA, 20 bp, synthetic construct
  source 1..20: mol_type = other DNA
tttgcctcaccaggctcagc

SEQ ID NO: 277350 - DNA, 20 bp, synthetic construct
  source 1..20: mol_type = other DNA
ctttgcctcaccaggctcag

SEQ ID NO: 277351 - DNA, 20 bp, synthetic construct
  source 1..20: mol_type = other DNA
gctttgcctcaccaggctca

SEQ ID NO: 277352 - DNA, 20 bp, synthetic construct
  source 1..20: mol_type = other DNA
tgctttgcctcaccaggctc

SEQ ID NO: 277353 - DNA, 20 bp, synthetic construct
  source 1..20: mol_type = other DNA
gtgctttgcctcaccaggct

SEQ ID NO: 277354 - DNA, 20 bp, synthetic construct
  source 1..20: mol_type = other DNA
tgtgctttgcctcaccaggc

SEQ ID NO: 277355 - DNA, 20 bp, synthetic construct
  source 1..20: mol_type = other DNA
ctgtgctttgcctcaccagg

SEQ ID NO: 277356 - DNA, 20 bp, synthetic construct
  source 1..20: mol_type = other DNA
gctgtgctttgcctcaccag

SEQ ID NO: 277357 - DNA, 20 bp, synthetic construct
  source 1..20: mol_type = other DNA
tgctgtgctttgcctcacca

SEQ ID NO: 277358 - DNA, 20 bp, synthetic construct
  source 1..20: mol_type = other DNA
gtgctgtgctttgcctcacc

SEQ ID NO: 277359 - DNA, 20 bp, synthetic construct
  source 1..20: mol_type = other DNA
tgtgctgtgctttgcctcac

SEQ ID NO: 277360 - DNA, 20 bp, synthetic construct
  source 1..20: mol_type = other DNA
ctgtgctgtgctttgcctca

SEQ ID NO: 277361 - DNA, 20 bp, synthetic construct
  source 1..20: mol_type = other DNA
gctgtgctgtgctttgcctc

SEQ ID NO: 277362 - DNA, 20 bp, synthetic construct
  source 1..20: mol_type = other DNA
cgctgtgctgtgctttgcct

SEQ ID NO: 277363 - DNA, 20 bp, synthetic construct
  source 1..20: mol_type = other DNA
tcgctgtgctgtgctttgcc

SEQ ID NO: 277364 - DNA, 20 bp, synthetic construct
  source 1..20: mol_type = other DNA
ctcgctgtgctgtgctttgc

SEQ ID NO: 277365 - DNA, 20 bp, synthetic construct
  source 1..20: mol_type = other DNA
gctcgctgtgctgtgctttg

SEQ ID NO: 277366 - DNA, 20 bp, synthetic construct
  source 1..20: mol_type = other DNA
tgctcgctgtgctgtgcttt

SEQ ID NO: 277367 - DNA, 20 bp, synthetic construct
  source 1..20: mol_type = other DNA
gtgctcgctgtgctgtgctt

SEQ ID NO: 277368 - DNA, 20 bp, synthetic construct
  source 1..20: mol_type = other DNA
ggtgctcgctgtgctgtgct

SEQ ID NO: 277369 - DNA, 20 bp, synthetic construct
  source 1..20: mol_type = other DNA
tggtgctcgctgtgctgtgc

SEQ ID NO: 277370 - DNA, 20 bp, synthetic construct
  source 1..20: mol_type = other DNA
ctggtgctcgctgtgctgtg

SEQ ID NO: 277371 - DNA, 20 bp, synthetic construct
  source 1..20: mol_type = other DNA
cctggtgctcgctgtgctgt

SEQ ID NO: 277372 - DNA, 20 bp, synthetic construct
  source 1..20: mol_type = other DNA
gcctggtgctcgctgtgctg

SEQ ID NO: 277373 - DNA, 20 bp, synthetic construct
  source 1..20: mol_type = other DNA
tgcctggtgctcgctgtgct

SEQ ID NO: 277374 - DNA, 20 bp, synthetic construct
  source 1..20: mol_type = other DNA
ctgcctggtgctcgctgtgc

SEQ ID NO: 277375 - DNA, 20 bp, synthetic construct
  source 1..20: mol_type = other DNA
actgcctggtgctcgctgtg

SEQ ID NO: 277376 - DNA, 20 bp, synthetic construct
  source 1..20: mol_type = other DNA
cactgcctggtgctcgctgt

SEQ ID NO: 277377 - DNA, 20 bp, synthetic construct
  source 1..20: mol_type = other DNA
gcactgcctggtgctcgctg

SEQ ID NO: 277378 - DNA, 20 bp, synthetic construct
  source 1..20: mol_type = other DNA
agcactgcctggtgctcgct

SEQ ID NO: 277379 - DNA, 20 bp, synthetic construct
  source 1..20: mol_type = other DNA
cagcactgcctggtgctcgc

SEQ ID NO: 277380 - DNA, 20 bp, synthetic construct
  source 1..20: mol_type = other DNA
ccagcactgcctggtgctcg

SEQ ID NO: 277381 - DNA, 20 bp, synthetic construct
  source 1..20: mol_type = other DNA
tccagcactgcctggtgctc

SEQ ID NO: 277382 - DNA, 20 bp, synthetic construct
  source 1..20: mol_type = other DNA
ctccagcactgcctggtgct

SEQ ID NO: 277383 - DNA, 20 bp, synthetic construct
  source 1..20: mol_type = other DNA
tctccagcactgcctggtgc

SEQ ID NO: 277384 - DNA, 20 bp, synthetic construct
  source 1..20: mol_type = other DNA
gtctccagcactgcctggtg

SEQ ID NO: 277385 - DNA, 20 bp, synthetic construct
  source 1..20: mol_type = other DNA
tgtctccagcactgcctggt

SEQ ID NO: 277386 - DNA, 20 bp, synthetic construct
  source 1..20: mol_type = other DNA
ctgtctccagcactgcctgg

SEQ ID NO: 277387 - DNA, 20 bp, synthetic construct
  source 1..20: mol_type = other DNA
cctgtctccagcactgcctg

SEQ ID NO: 277388 - DNA, 20 bp, synthetic construct
  source 1..20: mol_type = other DNA
gcctgtctccagcactgcct

SEQ ID NO: 277389 - DNA, 20 bp, synthetic construct
  source 1..20: mol_type = other DNA
ggcctgtctccagcactgcc

SEQ ID NO: 277390 - DNA, 20 bp, synthetic construct
  source 1..20: mol_type = other DNA
tggcctgtctccagcactgc

SEQ ID NO: 277391 - DNA, 20 bp, synthetic construct
  source 1..20: mol_type = other DNA
ttggcctgtctccagcactg

SEQ ID NO: 277392 - DNA, 20 bp, synthetic construct
  source 1..20: mol_type = other DNA
cttggcctgtctccagcact

SEQ ID NO: 277393 - DNA, 20 bp, synthetic construct
  source 1..20: mol_type = other DNA
acttggcctgtctccagcac

SEQ ID NO: 277394 - DNA, 20 bp, synthetic construct
  source 1..20: mol_type = other DNA
gacttggcctgtctccagca

SEQ ID NO: 277395 - DNA, 20 bp, synthetic construct
  source 1..20: mol_type = other DNA
agacttggcctgtctccagc

SEQ ID NO: 277396 - DNA, 20 bp, synthetic construct
  source 1..20: mol_type = other DNA
cagacttggcctgtctccag

SEQ ID NO: 277397 - DNA, 20 bp, synthetic construct
  source 1..20: mol_type = other DNA
ccagacttggcctgtctcca

SEQ ID NO: 277398 - DNA, 20 bp, synthetic construct
  source 1..20: mol_type = other DNA
cccagacttggcctgtctcc

SEQ ID NO: 277399 - DNA, 20 bp, synthetic construct
  source 1..20: mol_type = other DNA
gcccagacttggcctgtctc

SEQ ID NO: 277400 - DNA, 20 bp, synthetic construct
  source 1..20: mol_type = other DNA
ggcccagacttggcctgtct

SEQ ID NO: 277401 - DNA, 20 bp, synthetic construct
  source 1..20: mol_type = other DNA
tggcccagacttggcctgtc

SEQ ID NO: 277402 - DNA, 20 bp, synthetic construct
  source 1..20: mol_type = other DNA
ctggcccagacttggcctgt

SEQ ID NO: 277403 - DNA, 20 bp, synthetic construct
  source 1..20: mol_type = other DNA
gctggcccagacttggcctg

SEQ ID NO: 277404 - DNA, 20 bp, synthetic construct
  source 1..20: mol_type = other DNA
ggctggcccagacttggcct

SEQ ID NO: 277405 - DNA, 20 bp, synthetic construct
  source 1..20: mol_type = other DNA
aggctggcccagacttggcc

SEQ ID NO: 277406 - DNA, 20 bp, synthetic construct
  source 1..20: mol_type = other DNA
caggctggcccagacttggc

SEQ ID NO: 277407 - DNA, 20 bp, synthetic construct
  source 1..20: mol_type = other DNA
ccaggctggcccagacttgg

SEQ ID NO: 277408 - DNA, 20 bp, synthetic construct
  source 1..20: mol_type = other DNA
cccaggctggcccagacttg

SEQ ID NO: 277409 - DNA, 20 bp, synthetic construct
  source 1..20: mol_type = other DNA
tcccaggctggcccagactt

SEQ ID NO: 277410 - DNA, 20 bp, synthetic construct
  source 1..20: mol_type = other DNA
ctcccaggctggcccagact

SEQ ID NO: 277411 - DNA, 20 bp, synthetic construct
  source 1..20: mol_type = other DNA
gctcccaggctggcccagac

SEQ ID NO: 277412 - DNA, 20 bp, synthetic construct
  source 1..20: mol_type = other DNA
ggctcccaggctggcccaga

SEQ ID NO: 277413 - DNA, 20 bp, synthetic construct
  source 1..20: mol_type = other DNA
tggctcccaggctggcccag

SEQ ID NO: 277414 - DNA, 20 bp, synthetic construct
  source 1..20: mol_type = other DNA
ttggctcccaggctggccca

SEQ ID NO: 277415 - DNA, 20 bp, synthetic construct
  source 1..20: mol_type = other DNA
gttggctcccaggctggccc

SEQ ID NO: 277416 - DNA, 20 bp, synthetic construct
  source 1..20: mol_type = other DNA
agttggctcccaggctggcc

SEQ ID NO: 277417 - DNA, 20 bp, synthetic construct
  source 1..20: mol_type = other DNA
cagttggctcccaggctggc

SEQ ID NO: 277418 - DNA, 20 bp, synthetic construct
  source 1..20: mol_type = other DNA
acagttggctcccaggctgg

SEQ ID NO: 277419 - DNA, 20 bp, synthetic construct
  source 1..20: mol_type = other DNA
cacagttggctcccaggctg

SEQ ID NO: 277420 - DNA, 20 bp, synthetic construct
  source 1..20: mol_type = other DNA
tcacagttggctcccaggct

SEQ ID NO: 277421 - DNA, 20 bp, synthetic construct
  source 1..20: mol_type = other DNA
ctcacagttggctcccaggc

SEQ ID NO: 277422 - DNA, 20 bp, synthetic construct
  source 1..20: mol_type = other DNA
cctcacagttggctcccagg

SEQ ID NO: 277423 - DNA, 20 bp, synthetic construct
  source 1..20: mol_type = other DNA
gcctcacagttggctcccag

SEQ ID NO: 277424 - DNA, 20 bp, synthetic construct
  source 1..20: mol_type = other DNA
tgcctcacagttggctccca

SEQ ID NO: 277425 - DNA, 20 bp, synthetic construct
  source 1..20: mol_type = other DNA
gtgcctcacagttggctccc

SEQ ID NO: 277426 - DNA, 20 bp, synthetic construct
  source 1..20: mol_type = other DNA
cgtgcctcacagttggctcc

SEQ ID NO: 277427 - DNA, 20 bp, synthetic construct
  source 1..20: mol_type = other DNA
ccgtgcctcacagttggctc

SEQ ID NO: 277428 - DNA, 20 bp, synthetic construct
  source 1..20: mol_type = other DNA
tccgtgcctcacagttggct

SEQ ID NO: 277429 - DNA, 20 bp, synthetic construct
  source 1..20: mol_type = other DNA
gtccgtgcctcacagttggc

SEQ ID NO: 277430 - DNA, 20 bp, synthetic construct
  source 1..20: mol_type = other DNA
cgtccgtgcctcacagttgg

SEQ ID NO: 277431 - DNA, 20 bp, synthetic construct
  source 1..20: mol_type = other DNA
ccgtccgtgcctcacagttg

SEQ ID NO: 277432 - DNA, 20 bp, synthetic construct
  source 1..20: mol_type = other DNA
cccgtccgtgcctcacagtt

SEQ ID NO: 277433 - DNA, 20 bp, synthetic construct
  source 1..20: mol_type = other DNA
ccccgtccgtgcctcacagt

SEQ ID NO: 277434 - DNA, 20 bp, synthetic construct
  source 1..20: mol_type = other DNA
gccccgtccgtgcctcacag

SEQ ID NO: 277435 - DNA, 20 bp, synthetic construct
  source 1..20: mol_type = other DNA
agccccgtccgtgcctcaca

SEQ ID NO: 277436 - DNA, 20 bp, synthetic construct
  source 1..20: mol_type = other DNA
cagccccgtccgtgcctcac

SEQ ID NO: 277437 - DNA, 20 bp, synthetic construct
  source 1..20: mol_type = other DNA
acagccccgtccgtgcctca

SEQ ID NO: 277438 - DNA, 20 bp, synthetic construct
  source 1..20: mol_type = other DNA
cacagccccgtccgtgcctc

SEQ ID NO: 277439 - DNA, 20 bp, synthetic construct
  source 1..20: mol_type = other DNA
ccacagccccgtccgtgcct

SEQ ID NO: 277440 - DNA, 20 bp, synthetic construct
  source 1..20: mol_type = other DNA
cccacagccccgtccgtgcc

SEQ ID NO: 277441 - DNA, 20 bp, synthetic construct
  source 1..20: mol_type = other DNA
ccccacagccccgtccgtgc

SEQ ID NO: 277442 - DNA, 20 bp, synthetic construct
  source 1..20: mol_type = other DNA
gccccacagccccgtccgtg

SEQ ID NO: 277443 - DNA, 20 bp, synthetic construct
  source 1..20: mol_type = other DNA
agccccacagccccgtccgt

SEQ ID NO: 277444 - DNA, 20 bp, synthetic construct
  source 1..20: mol_type = other DNA
cagccccacagccccgtccg

SEQ ID NO: 277445 - DNA, 20 bp, synthetic construct
  source 1..20: mol_type = other DNA
acagccccacagccccgtcc

SEQ ID NO: 277446 - DNA, 20 bp, synthetic construct
  source 1..20: mol_type = other DNA
cacagccccacagccccgtc

SEQ ID NO: 277447 - DNA, 20 bp, synthetic construct
  source 1..20: mol_type = other DNA
ccacagccccacagccccgt

SEQ ID NO: 277448 - DNA, 20 bp, synthetic construct
  source 1..20: mol_type = other DNA
cccacagccccacagccccg

SEQ ID NO: 277449 - DNA, 20 bp, synthetic construct
  source 1..20: mol_type = other DNA
ccccacagccccacagcccc

SEQ ID NO: 277450 - DNA, 20 bp, synthetic construct
  source 1..20: mol_type = other DNA
gccccacagccccacagccc

SEQ ID NO: 277451 - DNA, 20 bp, synthetic construct
  source 1..20: mol_type = other DNA
agccccacagccccacagcc

SEQ ID NO: 277452 - DNA, 20 bp, synthetic construct
  source 1..20: mol_type = other DNA
cagccccacagccccacagc

SEQ ID NO: 277453 - DNA, 20 bp, synthetic construct
  source 1..20: mol_type = other DNA
gcagccccacagccccacag

SEQ ID NO: 277454 - DNA, 20 bp, synthetic construct
  source 1..20: mol_type = other DNA
tgcagccccacagccccaca

SEQ ID NO: 277455 - DNA, 20 bp, synthetic construct
  source 1..20: mol_type = other DNA
ctgcagccccacagccccac

SEQ ID NO: 277456 - DNA, 20 bp, synthetic construct
  source 1..20: mol_type = other DNA
cctgcagccccacagcccca

SEQ ID NO: 277457 - DNA, 20 bp, synthetic construct
  source 1..20: mol_type = other DNA
gcctgcagccccacagcccc

SEQ ID NO: 277458 - DNA, 20 bp, synthetic construct
  source 1..20: mol_type = other DNA
agcctgcagccccacagccc

SEQ ID NO: 277459 - DNA, 20 bp, synthetic construct
  source 1..20: mol_type = other DNA
aagcctgcagccccacagcc

SEQ ID NO: 277460 - DNA, 20 bp, synthetic construct
  source 1..20: mol_type = other DNA
caagcctgcagccccacagc

SEQ ID NO: 277461 - DNA, 20 bp, synthetic construct
  source 1..20: mol_type = other DNA
ccaagcctgcagccccacag

SEQ ID NO: 277462 - DNA, 20 bp, synthetic construct
  source 1..20: mol_type = other DNA
cccaagcctgcagccccaca

SEQ ID NO: 277463 - DNA, 20 bp, synthetic construct
  source 1..20: mol_type = other DNA
ccccaagcctgcagccccac

SEQ ID NO: 277464 - DNA, 20 bp, synthetic construct
  source 1..20: mol_type = other DNA
gccccaagcctgcagcccca

SEQ ID NO: 277465 - DNA, 20 bp, synthetic construct
  source 1..20: mol_type = other DNA
ggccccaagcctgcagcccc

SEQ ID NO: 277466 - DNA, 20 bp, synthetic construct
  source 1..20: mol_type = other DNA
tggccccaagcctgcagccc

SEQ ID NO: 277467 - DNA, 20 bp, synthetic construct
  source 1..20: mol_type = other DNA
ctggccccaagcctgcagcc

SEQ ID NO: 277468 - DNA, 20 bp, synthetic construct
  source 1..20: mol_type = other DNA
cctggccccaagcctgcagc

SEQ ID NO: 277469 - DNA, 20 bp, synthetic construct
  source 1..20: mol_type = other DNA
ccctggccccaagcctgcag

SEQ ID NO: 277470 - DNA, 20 bp, synthetic construct
  source 1..20: mol_type = other DNA
tccctggccccaagcctgca

SEQ ID NO: 277471 - DNA, 20 bp, synthetic construct
  source 1..20: mol_type = other DNA
ctccctggccccaagcctgc

SEQ ID NO: 277472 - DNA, 20 bp, synthetic construct
  source 1..20: mol_type = other DNA
cctccctggccccaagcctg

SEQ ID NO: 277473 - DNA, 20 bp, synthetic construct
  source 1..20: mol_type = other DNA
ccctccctggccccaagcct

SEQ ID NO: 277474 - DNA, 20 bp, synthetic construct
  source 1..20: mol_type = other DNA
tccctccctggccccaagcc

SEQ ID NO: 277475 - DNA, 20 bp, synthetic construct
  source 1..20: mol_type = other DNA
ctccctccctggccccaagc

SEQ ID NO: 277476 - DNA, 20 bp, synthetic construct
  source 1..20: mol_type = other DNA
cctccctccctggccccaag

SEQ ID NO: 277477 - DNA, 20 bp, synthetic construct
  source 1..20: mol_type = other DNA
ccctccctccctggccccaa

SEQ ID NO: 277478 - DNA, 20 bp, synthetic construct
  source 1..20: mol_type = other DNA
gccctccctccctggcccca

SEQ ID NO: 277479 - DNA, 20 bp, synthetic construct
  source 1..20: mol_type = other DNA
agccctccctccctggcccc

SEQ ID NO: 277480 - DNA, 20 bp, synthetic construct
  source 1..20: mol_type = other DNA
cagccctccctccctggccc

SEQ ID NO: 277481 - DNA, 20 bp, synthetic construct
  source 1..20: mol_type = other DNA
ccagccctccctccctggcc

SEQ ID NO: 277482 - DNA, 20 bp, synthetic construct
  source 1..20: mol_type = other DNA
cccagccctccctccctggc

SEQ ID NO: 277483 - DNA, 20 bp, synthetic construct
  source 1..20: mol_type = other DNA
gcccagccctccctccctgg

SEQ ID NO: 277484 - DNA, 20 bp, synthetic construct
  source 1..20: mol_type = other DNA
agcccagccctccctccctg

SEQ ID NO: 277485 - DNA, 20 bp, synthetic construct
  source 1..20: mol_type = other DNA
gagcccagccctccctccct

SEQ ID NO: 277486 - DNA, 20 bp, synthetic construct
  source 1..20: mol_type = other DNA
agagcccagccctccctccc

SEQ ID NO: 277487 - DNA, 20 bp, synthetic construct
  source 1..20: mol_type = other DNA
aagagcccagccctccctcc

SEQ ID NO: 277488 - DNA, 20 bp, synthetic construct
  source 1..20: mol_type = other DNA
aaagagcccagccctccctc

SEQ ID NO: 277489 - DNA, 20 bp, synthetic construct
  source 1..20: mol_type = other DNA
caaagagcccagccctccct

SEQ ID NO: 277490 - DNA, 20 bp, synthetic construct
  source 1..20: mol_type = other DNA
ccaaagagcccagccctccc

SEQ ID NO: 277491 - DNA, 20 bp, synthetic construct
  source 1..20: mol_type = other DNA
tccaaagagcccagccctcc

SEQ ID NO: 277492 - DNA, 20 bp, synthetic construct
  source 1..20: mol_type = other DNA
ttccaaagagcccagccctc

SEQ ID NO: 277493 - DNA, 20 bp, synthetic construct
  source 1..20: mol_type = other DNA
gttccaaagagcccagccct

SEQ ID NO: 277494 - DNA, 20 bp, synthetic construct
  source 1..20: mol_type = other DNA
tgttccaaagagcccagccc

SEQ ID NO: 277495 - DNA, 20 bp, synthetic construct
  source 1..20: mol_type = other DNA
ctgttccaaagagcccagcc

SEQ ID NO: 277496 - DNA, 20 bp, synthetic construct
  source 1..20: mol_type = other DNA
gctgttccaaagagcccagc

SEQ ID NO: 277497 - DNA, 20 bp, synthetic construct
  source 1..20: mol_type = other DNA
ggctgttccaaagagcccag

SEQ ID NO: 277498 - DNA, 20 bp, synthetic construct
  source 1..20: mol_type = other DNA
aggctgttccaaagagccca

SEQ ID NO: 277499 - DNA, 20 bp, synthetic construct
  source 1..20: mol_type = other DNA
aaggctgttccaaagagccc

SEQ ID NO: 277500 - DNA, 20 bp, synthetic construct
  source 1..20: mol_type = other DNA
caaggctgttccaaagagcc

SEQ ID NO: 277501 - DNA, 20 bp, synthetic construct
  source 1..20: mol_type = other DNA
tcaaggctgttccaaagagc

SEQ ID NO: 277502 - DNA, 20 bp, synthetic construct
  source 1..20: mol_type = other DNA
ctcaaggctgttccaaagag

SEQ ID NO: 277503 - DNA, 20 bp, synthetic construct
  source 1..20: mol_type = other DNA
tctcaaggctgttccaaaga

SEQ ID NO: 277504 - DNA, 20 bp, synthetic construct
  source 1..20: mol_type = other DNA
ctctcaaggctgttccaaag

SEQ ID NO: 277505 - DNA, 20 bp, synthetic construct
  source 1..20: mol_type = other DNA
tctctcaaggctgttccaaa

SEQ ID NO: 277506 - DNA, 20 bp, synthetic construct
  source 1..20: mol_type = other DNA
ttctctcaaggctgttccaa

SEQ ID NO: 277507 - DNA, 20 bp, synthetic construct
  source 1..20: mol_type = other DNA
gttctctcaaggctgttcca

SEQ ID NO: 277508 - DNA, 20 bp, synthetic construct
  source 1..20: mol_type = other DNA
agttctctcaaggctgttcc

SEQ ID NO: 277509 - DNA, 20 bp, synthetic construct
  source 1..20: mol_type = other DNA
cagttctctcaaggctgttc

SEQ ID NO: 277510 - DNA, 20 bp, synthetic construct
  source 1..20: mol_type = other DNA
tcagttctctcaaggctgtt

SEQ ID NO: 277511 - DNA, 20 bp, synthetic construct
  source 1..20: mol_type = other DNA
ttcagttctctcaaggctgt

SEQ ID NO: 277512 - DNA, 20 bp, synthetic construct
  source 1..20: mol_type = other DNA
gttcagttctctcaaggctg

SEQ ID NO: 277513 - DNA, 20 bp, synthetic construct
  source 1..20: mol_type = other DNA
ggttcagttctctcaaggct

SEQ ID NO: 277514 - DNA, 20 bp, synthetic construct
  source 1..20: mol_type = other DNA
gggttcagttctctcaaggc

SEQ ID NO: 277515 - DNA, 20 bp, synthetic construct
  source 1..20: mol_type = other DNA
tgggttcagttctctcaagg

SEQ ID NO: 277516 - DNA, 20 bp, synthetic construct
  source 1..20: mol_type = other DNA
ttgggttcagttctctcaag

SEQ ID NO: 277517 - DNA, 20 bp, synthetic construct
  source 1..20: mol_type = other DNA
tttgggttcagttctctcaa

SEQ ID NO: 277518 - DNA, 20 bp, synthetic construct
  source 1..20: mol_type = other DNA
gtttgggttcagttctctca

SEQ ID NO: 277519 - DNA, 20 bp, synthetic construct
  source 1..20: mol_type = other DNA
tgtttgggttcagttctctc

SEQ ID NO: 277520 - DNA, 20 bp, synthetic construct
  source 1..20: mol_type = other DNA
ttgtttgggttcagttctct

SEQ ID NO: 277521 - DNA, 20 bp, synthetic construct
  source 1..20: mol_type = other DNA
tttgtttgggttcagttctc

SEQ ID NO: 277522 - DNA, 20 bp, synthetic construct
  source 1..20: mol_type = other DNA
ttttgtttgggttcagttct

SEQ ID NO: 277523 - DNA, 20 bp, synthetic construct
  source 1..20: mol_type = other DNA
gttttgtttgggttcagttc

SEQ ID NO: 277524 - DNA, 20 bp, synthetic construct
  source 1..20: mol_type = other DNA
ggttttgtttgggttcagtt

SEQ ID NO: 277525 - DNA, 20 bp, synthetic construct
  source 1..20: mol_type = other DNA
tggttttgtttgggttcagt

SEQ ID NO: 277526 - DNA, 20 bp, synthetic construct
  source 1..20: mol_type = other DNA
ctggttttgtttgggttcag

SEQ ID NO: 277527 - DNA, 20 bp, synthetic construct
  source 1..20: mol_type = other DNA
tctggttttgtttgggttca

SEQ ID NO: 277528 - DNA, 20 bp, synthetic construct
  source 1..20: mol_type = other DNA
atctggttttgtttgggttc

SEQ ID NO: 277529 - DNA, 20 bp, synthetic construct
  source 1..20: mol_type = other DNA
gatctggttttgtttgggtt

SEQ ID NO: 277530 - DNA, 20 bp, synthetic construct
  source 1..20: mol_type = other DNA
tgatctggttttgtttgggt

SEQ ID NO: 277531 - DNA, 20 bp, synthetic construct
  source 1..20: mol_type = other DNA
ttgatctggttttgtttggg

SEQ ID NO: 277532 - DNA, 20 bp, synthetic construct
  source 1..20: mol_type = other DNA
cttgatctggttttgtttgg

SEQ ID NO: 277533 - DNA, 20 bp, synthetic construct
  source 1..20: mol_type = other DNA
ccttgatctggttttgtttg

SEQ ID NO: 277534 - DNA, 20 bp, synthetic construct
  source 1..20: mol_type = other DNA
accttgatctggttttgttt

SEQ ID NO: 277535 - DNA, 20 bp, synthetic construct
  source 1..20: mol_type = other DNA
gaccttgatctggttttgtt

SEQ ID NO: 277536 - DNA, 20 bp, synthetic construct
  source 1..20: mol_type = other DNA
agaccttgatctggttttgt

SEQ ID NO: 277537 - DNA, 20 bp, synthetic construct
  source 1..20: mol_type = other DNA
tagaccttgatctggttttg

SEQ ID NO: 277538 - DNA, 20 bp, synthetic construct
  source 1..20: mol_type = other DNA
ctagaccttgatctggtttt

SEQ ID NO: 277539 - DNA, 20 bp, synthetic construct
  source 1..20: mol_type = other DNA
actagaccttgatctggttt

SEQ ID NO: 277540 - DNA, 20 bp, synthetic construct
  source 1..20: mol_type = other DNA
cactagaccttgatctggtt

SEQ ID NO: 277541 - DNA, 20 bp, synthetic construct
  source 1..20: mol_type = other DNA
tcactagaccttgatctggt

SEQ ID NO: 277542 - DNA, 20 bp, synthetic construct
  source 1..20: mol_type = other DNA
ctcactagaccttgatctgg

SEQ ID NO: 277543 - DNA, 20 bp, synthetic construct
  source 1..20: mol_type = other DNA
tctcactagaccttgatctg

SEQ ID NO: 277544 - DNA, 20 bp, synthetic construct
  source 1..20: mol_type = other DNA
ctctcactagaccttgatct

SEQ ID NO: 277545 - DNA, 20 bp, synthetic construct
  source 1..20: mol_type = other DNA
gctctcactagaccttgatc

SEQ ID NO: 277546 - DNA, 20 bp, synthetic construct
  source 1..20: mol_type = other DNA
agctctcactagaccttgat

SEQ ID NO: 277547 - DNA, 20 bp, synthetic construct
  source 1..20: mol_type = other DNA
aagctctcactagaccttga

SEQ ID NO: 277548 - DNA, 20 bp, synthetic construct
  source 1..20: mol_type = other DNA
taagctctcactagaccttg

SEQ ID NO: 277549 - DNA, 20 bp, synthetic construct
  source 1..20: mol_type = other DNA
ctaagctctcactagacctt

SEQ ID NO: 277550 - DNA, 20 bp, synthetic construct
  source 1..20: mol_type = other DNA
cctaagctctcactagacct

SEQ ID NO: 277551 - DNA, 20 bp, synthetic construct
  source 1..20: mol_type = other DNA
ccctaagctctcactagacc

SEQ ID NO: 277552 - DNA, 20 bp, synthetic construct
  source 1..20: mol_type = other DNA
gccctaagctctcactagac

SEQ ID NO: 277553 - DNA, 20 bp, synthetic construct
  source 1..20: mol_type = other DNA
agccctaagctctcactaga

SEQ ID NO: 277554 - DNA, 20 bp, synthetic construct
  source 1..20: mol_type = other DNA
cagccctaagctctcactag

SEQ ID NO: 277555 - DNA, 20 bp, synthetic construct
  source 1..20: mol_type = other DNA
gcagccctaagctctcacta

SEQ ID NO: 277556 - DNA, 20 bp, synthetic construct
  source 1..20: mol_type = other DNA
agcagccctaagctctcact

SEQ ID NO: 277557 - DNA, 20 bp, synthetic construct
  source 1..20: mol_type = other DNA
aagcagccctaagctctcac

SEQ ID NO: 277558 - DNA, 20 bp, synthetic construct
  source 1..20: mol_type = other DNA
aaagcagccctaagctctca

SEQ ID NO: 277559 - DNA, 20 bp, synthetic construct
  source 1..20: mol_type = other DNA
caaagcagccctaagctctc

SEQ ID NO: 277560 - DNA, 20 bp, synthetic construct
  source 1..20: mol_type = other DNA
ccaaagcagccctaagctct

SEQ ID NO: 277561 - DNA, 20 bp, synthetic construct
  source 1..20: mol_type = other DNA
cccaaagcagccctaagctc

SEQ ID NO: 277562 - DNA, 20 bp, synthetic construct
  source 1..20: mol_type = other DNA
acccaaagcagccctaagct

SEQ ID NO: 277563 - DNA, 20 bp, synthetic construct
  source 1..20: mol_type = other DNA
cacccaaagcagccctaagc

SEQ ID NO: 277564 - DNA, 20 bp, synthetic construct
  source 1..20: mol_type = other DNA
gcacccaaagcagccctaag

SEQ ID NO: 277565 - DNA, 20 bp, synthetic construct
  source 1..20: mol_type = other DNA
agcacccaaagcagccctaa

SEQ ID NO: 277566 - DNA, 20 bp, synthetic construct
  source 1..20: mol_type = other DNA
gagcacccaaagcagcccta

SEQ ID NO: 277567 - DNA, 20 bp, synthetic construct
  source 1..20: mol_type = other DNA
ggagcacccaaagcagccct

SEQ ID NO: 277568 - DNA, 20 bp, synthetic construct
  source 1..20: mol_type = other DNA
tggagcacccaaagcagccc

SEQ ID NO: 277569 - DNA, 20 bp, synthetic construct
  source 1..20: mol_type = other DNA
ctggagcacccaaagcagcc

SEQ ID NO: 277570 - DNA, 20 bp, synthetic construct
  source 1..20: mol_type = other DNA
cctggagcacccaaagcagc

SEQ ID NO: 277571 - DNA, 20 bp, synthetic construct
  source 1..20: mol_type = other DNA
tcctggagcacccaaagcag

SEQ ID NO: 277572 - DNA, 20 bp, synthetic construct
  source 1..20: mol_type = other DNA
ttcctggagcacccaaagca

SEQ ID NO: 277573 - DNA, 20 bp, synthetic construct
  source 1..20: mol_type = other DNA
tttcctggagcacccaaagc

SEQ ID NO: 277574 - DNA, 20 bp, synthetic construct
  source 1..20: mol_type = other DNA
atttcctggagcacccaaag

SEQ ID NO: 277575 - DNA, 20 bp, synthetic construct
  source 1..20: mol_type = other DNA
aatttcctggagcacccaaa

SEQ ID NO: 277576 - DNA, 20 bp, synthetic construct
  source 1..20: mol_type = other DNA
caatttcctggagcacccaa

SEQ ID NO: 277577 - DNA, 20 bp, synthetic construct
  source 1..20: mol_type = other DNA
tcaatttcctggagcaccca

SEQ ID NO: 277578 - DNA, 20 bp, synthetic construct
  source 1..20: mol_type = other DNA
atcaatttcctggagcaccc

SEQ ID NO: 277579 - DNA, 20 bp, synthetic construct
  source 1..20: mol_type = other DNA
aatcaatttcctggagcacc

SEQ ID NO: 277580 - DNA, 20 bp, synthetic construct
  source 1..20: mol_type = other DNA
taatcaatttcctggagcac

SEQ ID NO: 277581 - DNA, 20 bp, synthetic construct
  source 1..20: mol_type = other DNA
ttaatcaatttcctggagca

SEQ ID NO: 277582 - DNA, 20 bp, synthetic construct
  source 1..20: mol_type = other DNA
tttaatcaatttcctggagc

SEQ ID NO: 277583 - DNA, 20 bp, synthetic construct
  source 1..20: mol_type = other DNA
gtttaatcaatttcctggag

SEQ ID NO: 277584 - DNA, 20 bp, synthetic construct
  source 1..20: mol_type = other DNA
ggtttaatcaatttcctgga

SEQ ID NO: 277585 - DNA, 20 bp, synthetic construct
  source 1..20: mol_type = other DNA
tggtttaatcaatttcctgg

SEQ ID NO: 277586 - DNA, 20 bp, synthetic construct
  source 1..20: mol_type = other DNA
ttggtttaatcaatttcctg

SEQ ID NO: 277587 - DNA, 20 bp, synthetic construct
  source 1..20: mol_type = other DNA
cttggtttaatcaatttcct

SEQ ID NO: 277588 - DNA, 20 bp, synthetic construct
  source 1..20: mol_type = other DNA
acttggtttaatcaatttcc

SEQ ID NO: 277589 - DNA, 20 bp, synthetic construct
  source 1..20: mol_type = other DNA
cacttggtttaatcaatttc

SEQ ID NO: 277590 - DNA, 20 bp, synthetic construct
  source 1..20: mol_type = other DNA
ccacttggtttaatcaattt

SEQ ID NO: 277591 - DNA, 20 bp, synthetic construct
  source 1..20: mol_type = other DNA
tccacttggtttaatcaatt

SEQ ID NO: 277592 - DNA, 20 bp, synthetic construct
  source 1..20: mol_type = other DNA
gtccacttggtttaatcaat

SEQ ID NO: 277593 - DNA, 20 bp, synthetic construct
  source 1..20: mol_type = other DNA
tgtccacttggtttaatcaa

SEQ ID NO: 277594 - DNA, 20 bp, synthetic construct
  source 1..20: mol_type = other DNA
gtgtccacttggtttaatca

SEQ ID NO: 277595 - DNA, 20 bp, synthetic construct
  source 1..20: mol_type = other DNA
tgtgtccacttggtttaatc

SEQ ID NO: 277596 - DNA, 20 bp, synthetic construct
  source 1..20: mol_type = other DNA
gtgtgtccacttggtttaat

SEQ ID NO: 277597 - DNA, 20 bp, synthetic construct
  source 1..20: mol_type = other DNA
tgtgtgtccacttggtttaa

SEQ ID NO: 277598 - DNA, 20 bp, synthetic construct
  source 1..20: mol_type = other DNA
gtgtgtgtccacttggttta

SEQ ID NO: 277599 - DNA, 20 bp, synthetic construct
  source 1..20: mol_type = other DNA
ggtgtgtgtccacttggttt

SEQ ID NO: 277600 - DNA, 20 bp, synthetic construct
  source 1..20: mol_type = other DNA
gggtgtgtgtccacttggtt

SEQ ID NO: 277601 - DNA, 20 bp, synthetic construct
  source 1..20: mol_type = other DNA
ggggtgtgtgtccacttggt

SEQ ID NO: 277602 - DNA, 20 bp, synthetic construct
  source 1..20: mol_type = other DNA
gggggtgtgtgtccacttgg

SEQ ID NO: 277603 - DNA, 20 bp, synthetic construct
  source 1..20: mol_type = other DNA
tgggggtgtgtgtccacttg

SEQ ID NO: 277604 - DNA, 20 bp, synthetic construct
  source 1..20: mol_type = other DNA
ctgggggtgtgtgtccactt

SEQ ID NO: 277605 - DNA, 20 bp, synthetic construct
  source 1..20: mol_type = other DNA
gctgggggtgtgtgtccact

SEQ ID NO: 277606 - DNA, 20 bp, synthetic construct
  source 1..20: mol_type = other DNA
ggctgggggtgtgtgtccac

SEQ ID NO: 277607 - DNA, 20 bp, synthetic construct
  source 1..20: mol_type = other DNA
gggctgggggtgtgtgtcca

SEQ ID NO: 277608 - DNA, 20 bp, synthetic construct
  source 1..20: mol_type = other DNA
ggggctgggggtgtgtgtcc

SEQ ID NO: 277609 - DNA, 20 bp, synthetic construct
  source 1..20: mol_type = other DNA
tggggctgggggtgtgtgtc

SEQ ID NO: 277610 - DNA, 20 bp, synthetic construct
  source 1..20: mol_type = other DNA
gtggggctgggggtgtgtgt

SEQ ID NO: 277611 - DNA, 20 bp, synthetic construct
  source 1..20: mol_type = other DNA
ggtggggctgggggtgtgtg

SEQ ID NO: 277612 - DNA, 20 bp, synthetic construct
  source 1..20: mol_type = other DNA
aggtggggctgggggtgtgt

SEQ ID NO: 277613 - DNA, 20 bp, synthetic construct
  source 1..20: mol_type = other DNA
gaggtggggctgggggtgtg

SEQ ID NO: 277614 - DNA, 20 bp, synthetic construct
  source 1..20: mol_type = other DNA
tgaggtggggctgggggtgt

SEQ ID NO: 277615 - DNA, 20 bp, synthetic construct
  source 1..20: mol_type = other DNA
gtgaggtggggctgggggtg

SEQ ID NO: 277616 - DNA, 20 bp, synthetic construct
  source 1..20: mol_type = other DNA
ggtgaggtggggctgggggt

SEQ ID NO: 277617 - DNA, 20 bp, synthetic construct
  source 1..20: mol_type = other DNA
tggtgaggtggggctggggg

SEQ ID NO: 277618 - DNA, 20 bp, synthetic construct
  source 1..20: mol_type = other DNA
gtggtgaggtggggctgggg

SEQ ID NO: 277619 - DNA, 20 bp, synthetic construct
  source 1..20: mol_type = other DNA
tgtggtgaggtggggctggg

SEQ ID NO: 277620 - DNA, 20 bp, synthetic construct
  source 1..20: mol_type = other DNA
ctgtggtgaggtggggctgg

SEQ ID NO: 277621 - DNA, 20 bp, synthetic construct
  source 1..20: mol_type = other DNA
gctgtggtgaggtggggctg

SEQ ID NO: 277622 - DNA, 20 bp, synthetic construct
  source 1..20: mol_type = other DNA
ggctgtggtgaggtggggct

SEQ ID NO: 277623 - DNA, 20 bp, synthetic construct
  source 1..20: mol_type = other DNA
aggctgtggtgaggtggggc

SEQ ID NO: 277624 - DNA, 20 bp, synthetic construct
  source 1..20: mol_type = other DNA
gaggctgtggtgaggtgggg

SEQ ID NO: 277625 - DNA, 20 bp, synthetic construct
  source 1..20: mol_type = other DNA
agaggctgtggtgaggtggg

SEQ ID NO: 277626 - DNA, 20 bp, synthetic construct
  source 1..20: mol_type = other DNA
gagaggctgtggtgaggtgg

SEQ ID NO: 277627 - DNA, 20 bp, synthetic construct
  source 1..20: mol_type = other DNA
ggagaggctgtggtgaggtg

SEQ ID NO: 277628 - DNA, 20 bp, synthetic construct
  source 1..20: mol_type = other DNA
aggagaggctgtggtgaggt

SEQ ID NO: 277629 - DNA, 20 bp, synthetic construct
  source 1..20: mol_type = other DNA
aaggagaggctgtggtgagg

SEQ ID NO: 277630 - DNA, 20 bp, synthetic construct
  source 1..20: mol_type = other DNA
gaaggagaggctgtggtgag

SEQ ID NO: 277631 - DNA, 20 bp, synthetic construct
  source 1..20: mol_type = other DNA
tgaaggagaggctgtggtga

SEQ ID NO: 277632 - DNA, 20 bp, synthetic construct
  source 1..20: mol_type = other DNA
ctgaaggagaggctgtggtg

SEQ ID NO: 277633 - DNA, 20 bp, synthetic construct
  source 1..20: mol_type = other DNA
cctgaaggagaggctgtggt

SEQ ID NO: 277634 - DNA, 20 bp, synthetic construct
  source 1..20: mol_type = other DNA
ccctgaaggagaggctgtgg

SEQ ID NO: 277635 - DNA, 20 bp, synthetic construct
  source 1..20: mol_type = other DNA
accctgaaggagaggctgtg

SEQ ID NO: 277636 - DNA, 20 bp, synthetic construct
  source 1..20: mol_type = other DNA
gaccctgaaggagaggctgt

SEQ ID NO: 277637 - DNA, 20 bp, synthetic construct
  source 1..20: mol_type = other DNA
tgaccctgaaggagaggctg

SEQ ID NO: 277638 - DNA, 20 bp, synthetic construct
  source 1..20: mol_type = other DNA
ttgaccctgaaggagaggct

SEQ ID NO: 277639 - DNA, 20 bp, synthetic construct
  source 1..20: mol_type = other DNA
tttgaccctgaaggagaggc

SEQ ID NO: 277640 - DNA, 20 bp, synthetic construct
  source 1..20: mol_type = other DNA
gtttgaccctgaaggagagg

SEQ ID NO: 277641 - DNA, 20 bp, synthetic construct
  source 1..20: mol_type = other DNA
agtttgaccctgaaggagag

SEQ ID NO: 277642 - DNA, 20 bp, synthetic construct
  source 1..20: mol_type = other DNA
gagtttgaccctgaaggaga

SEQ ID NO: 277643 - DNA, 20 bp, synthetic construct
  source 1..20: mol_type = other DNA
agagtttgaccctgaaggag

SEQ ID NO: 277644 - DNA, 20 bp, synthetic construct
  source 1..20: mol_type = other DNA
cagagtttgaccctgaagga

SEQ ID NO: 277645 - DNA, 20 bp, synthetic construct
  source 1..20: mol_type = other DNA
tcagagtttgaccctgaagg

SEQ ID NO: 277646 - DNA, 20 bp, synthetic construct
  source 1..20: mol_type = other DNA
gtcagagtttgaccctgaag

SEQ ID NO: 277647 - DNA, 20 bp, synthetic construct
  source 1..20: mol_type = other DNA
ggtcagagtttgaccctgaa

SEQ ID NO: 277648 - DNA, 20 bp, synthetic construct
  source 1..20: mol_type = other DNA
tggtcagagtttgaccctga

SEQ ID NO: 277649 - DNA, 20 bp, synthetic construct
  source 1..20: mol_type = other DNA
gtggtcagagtttgaccctg

SEQ ID NO: 277650 - DNA, 20 bp, synthetic construct
  source 1..20: mol_type = other DNA
tgtggtcagagtttgaccct

SEQ ID NO: 277651 - DNA, 20 bp, synthetic construct
  source 1..20: mol_type = other DNA
ctgtggtcagagtttgaccc

SEQ ID NO: 277652 - DNA, 20 bp, synthetic construct
  source 1..20: mol_type = other DNA
tctgtggtcagagtttgacc

SEQ ID NO: 277653 - DNA, 20 bp, synthetic construct
  source 1..20: mol_type = other DNA
gtctgtggtcagagtttgac

SEQ ID NO: 277654 - DNA, 20 bp, synthetic construct
  source 1..20: mol_type = other DNA
tgtctgtggtcagagtttga

SEQ ID NO: 277655 - DNA, 20 bp, synthetic construct
  source 1..20: mol_type = other DNA
atgtctgtggtcagagtttg

SEQ ID NO: 277656 - DNA, 20 bp, synthetic construct
  source 1..20: mol_type = other DNA
aatgtctgtggtcagagttt

SEQ ID NO: 277657 - DNA, 20 bp, synthetic construct
  source 1..20: mol_type = other DNA
aaatgtctgtggtcagagtt

SEQ ID NO: 277658 - DNA, 20 bp, synthetic construct
  source 1..20: mol_type = other DNA
gaaatgtctgtggtcagagt

SEQ ID NO: 277659 - DNA, 20 bp, synthetic construct
  source 1..20: mol_type = other DNA
agaaatgtctgtggtcagag

SEQ ID NO: 277660 - DNA, 20 bp, synthetic construct
  source 1..20: mol_type = other DNA
gagaaatgtctgtggtcaga

SEQ ID NO: 277661 - DNA, 20 bp, synthetic construct
  source 1..20: mol_type = other DNA
ggagaaatgtctgtggtcag

SEQ ID NO: 277662 - DNA, 20 bp, synthetic construct
  source 1..20: mol_type = other DNA
gggagaaatgtctgtggtca

SEQ ID NO: 277663 - DNA, 20 bp, synthetic construct
  source 1..20: mol_type = other DNA
ggggagaaatgtctgtggtc

SEQ ID NO: 277664 - DNA, 20 bp, synthetic construct
  source 1..20: mol_type = other DNA
aggggagaaatgtctgtggt

SEQ ID NO: 277665 - DNA, 20 bp, synthetic construct
  source 1..20: mol_type = other DNA
caggggagaaatgtctgtgg

SEQ ID NO: 277666 - DNA, 20 bp, synthetic construct
  source 1..20: mol_type = other DNA
tcaggggagaaatgtctgtg

SEQ ID NO: 277667 - DNA, 20 bp, synthetic construct
  source 1..20: mol_type = other DNA
gtcaggggagaaatgtctgt

SEQ ID NO: 277668 - DNA, 20 bp, synthetic construct
  source 1..20: mol_type = other DNA
agtcaggggagaaatgtctg

SEQ ID NO: 277669 - DNA, 20 bp, synthetic construct
  source 1..20: mol_type = other DNA
tagtcaggggagaaatgtct

SEQ ID NO: 277670 - DNA, 20 bp, synthetic construct
  source 1..20: mol_type = other DNA
ctagtcaggggagaaatgtc

SEQ ID NO: 277671 - DNA, 20 bp, synthetic construct
  source 1..20: mol_type = other DNA
cctagtcaggggagaaatgt

SEQ ID NO: 277672 - DNA, 20 bp, synthetic construct
  source 1..20: mol_type = other DNA
tcctagtcaggggagaaatg

SEQ ID NO: 277673 - DNA, 20 bp, synthetic construct
  source 1..20: mol_type = other DNA
ctcctagtcaggggagaaat

SEQ ID NO: 277674 - DNA, 20 bp, synthetic construct
  source 1..20: mol_type = other DNA
actcctagtcaggggagaaa

SEQ ID NO: 277675 - DNA, 20 bp, synthetic construct
  source 1..20: mol_type = other DNA
aactcctagtcaggggagaa

SEQ ID NO: 277676 - DNA, 20 bp, synthetic construct
  source 1..20: mol_type = other DNA
gaactcctagtcaggggaga

SEQ ID NO: 277677 - DNA, 20 bp, synthetic construct
  source 1..20: mol_type = other DNA
ggaactcctagtcaggggag

SEQ ID NO: 277678 - DNA, 20 bp, synthetic construct
  source 1..20: mol_type = other DNA
gggaactcctagtcagggga

SEQ ID NO: 277679 - DNA, 20 bp, synthetic construct
  source 1..20: mol_type = other DNA
agggaactcctagtcagggg

SEQ ID NO: 277680 - DNA, 20 bp, synthetic construct
  source 1..20: mol_type = other DNA
cagggaactcctagtcaggg

SEQ ID NO: 277681 - DNA, 20 bp, synthetic construct
  source 1..20: mol_type = other DNA
ccagggaactcctagtcagg

SEQ ID NO: 277682 - DNA, 20 bp, synthetic construct
  source 1..20: mol_type = other DNA
tccagggaactcctagtcag

SEQ ID NO: 277683 - DNA, 20 bp, synthetic construct
  source 1..20: mol_type = other DNA
atccagggaactcctagtca

SEQ ID NO: 277684 - DNA, 20 bp, synthetic construct
  source 1..20: mol_type = other DNA
gatccagggaactcctagtc

SEQ ID NO: 277685 - DNA, 20 bp, synthetic construct
  source 1..20: mol_type = other DNA
tgatccagggaactcctagt

SEQ ID NO: 277686 - DNA, 20 bp, synthetic construct
  source 1..20: mol_type = other DNA
ttgatccagggaactcctag

SEQ ID NO: 277687 - DNA, 20 bp, synthetic construct
  source 1..20: mol_type = other DNA
tttgatccagggaactccta

SEQ ID NO: 277688 - DNA, 20 bp, synthetic construct
  source 1..20: mol_type = other DNA
ttttgatccagggaactcct

SEQ ID NO: 277689 - DNA, 20 bp, synthetic construct
  source 1..20: mol_type = other DNA
attttgatccagggaactcc

SEQ ID NO: 277690 - DNA, 20 bp, synthetic construct
  source 1..20: mol_type = other DNA
aattttgatccagggaactc

SEQ ID NO: 277691 - DNA, 20 bp, synthetic construct
  source 1..20: mol_type = other DNA
caattttgatccagggaact

SEQ ID NO: 277692 - DNA, 20 bp, synthetic construct
  source 1..20: mol_type = other DNA
ccaattttgatccagggaac

SEQ ID NO: 277693 - DNA, 20 bp, synthetic construct
  source 1..20: mol_type = other DNA
cccaattttgatccagggaa

SEQ ID NO: 277694 - DNA, 20 bp, synthetic construct
  source 1..20: mol_type = other DNA
tcccaattttgatccaggga

SEQ ID NO: 277695 - DNA, 20 bp, synthetic construct
  source 1..20: mol_type = other DNA
ctcccaattttgatccaggg

SEQ ID NO: 277696 - DNA, 20 bp, synthetic construct
  source 1..20: mol_type = other DNA
gctcccaattttgatccagg

SEQ ID NO: 277697 - DNA, 20 bp, synthetic construct
  source 1..20: mol_type = other DNA
agctcccaattttgatccag

SEQ ID NO: 277698 - DNA, 20 bp, synthetic construct
  source 1..20: mol_type = other DNA
aagctcccaattttgatcca

SEQ ID NO: 277699 - DNA, 20 bp, synthetic construct
  source 1..20: mol_type = other DNA
caagctcccaattttgatcc

SEQ ID NO: 277700 - DNA, 20 bp, synthetic construct
  source 1..20: mol_type = other DNA
gcaagctcccaattttgatc

SEQ ID NO: 277701 - DNA, 20 bp, synthetic construct
  source 1..20: mol_type = other DNA
tgcaagctcccaattttgat

SEQ ID NO: 277702 - DNA, 20 bp, synthetic construct
  source 1..20: mol_type = other DNA
ttgcaagctcccaattttga

SEQ ID NO: 277703 - DNA, 20 bp, synthetic construct
  source 1..20: mol_type = other DNA
gttgcaagctcccaattttg

SEQ ID NO: 277704 - DNA, 20 bp, synthetic construct
  source 1..20: mol_type = other DNA
tgttgcaagctcccaatttt

SEQ ID NO: 277705 - DNA, 20 bp, synthetic construct
  source 1..20: mol_type = other DNA
gtgttgcaagctcccaattt

SEQ ID NO: 277706 - DNA, 20 bp, synthetic construct
  source 1..20: mol_type = other DNA
tgtgttgcaagctcccaatt

SEQ ID NO: 277707 - DNA, 20 bp, synthetic construct
  source 1..20: mol_type = other DNA
atgtgttgcaagctcccaat

SEQ ID NO: 277708 - DNA, 20 bp, synthetic construct
  source 1..20: mol_type = other DNA
gatgtgttgcaagctcccaa

SEQ ID NO: 277709 - DNA, 20 bp, synthetic construct
  source 1..20: mol_type = other DNA
cgatgtgttgcaagctccca

SEQ ID NO: 277710 - DNA, 20 bp, synthetic construct
  source 1..20: mol_type = other DNA
acgatgtgttgcaagctccc

SEQ ID NO: 277711 - DNA, 20 bp, synthetic construct
  source 1..20: mol_type = other DNA
aacgatgtgttgcaagctcc

SEQ ID NO: 277712 - DNA, 20 bp, synthetic construct
  source 1..20: mol_type = other DNA
gaacgatgtgttgcaagctc

SEQ ID NO: 277713 - DNA, 20 bp, synthetic construct
  source 1..20: mol_type = other DNA
agaacgatgtgttgcaagct

SEQ ID NO: 277714 - DNA, 20 bp, synthetic construct
  source 1..20: mol_type = other DNA
gagaacgatgtgttgcaagc

SEQ ID NO: 277715 - DNA, 20 bp, synthetic construct
  source 1..20: mol_type = other DNA
agagaacgatgtgttgcaag

SEQ ID NO: 277716 - DNA, 20 bp, synthetic construct
  source 1..20: mol_type = other DNA
gagagaacgatgtgttgcaa

SEQ ID NO: 277717 - DNA, 20 bp, synthetic construct
  source 1..20: mol_type = other DNA
ggagagaacgatgtgttgca

SEQ ID NO: 277718 - DNA, 20 bp, synthetic construct
  source 1..20: mol_type = other DNA
gggagagaacgatgtgttgc

SEQ ID NO: 277719 - DNA, 20 bp, synthetic construct
  source 1..20: mol_type = other DNA
agggagagaacgatgtgttg

SEQ ID NO: 277720 - DNA, 20 bp, synthetic construct
  source 1..20: mol_type = other DNA
aagggagagaacgatgtgtt

SEQ ID NO: 277721 - DNA, 20 bp, synthetic construct
  source 1..20: mol_type = other DNA
caagggagagaacgatgtgt

SEQ ID NO: 277722 - DNA, 20 bp, synthetic construct
  source 1..20: mol_type = other DNA
tcaagggagagaacgatgtg

SEQ ID NO: 277723 - DNA, 20 bp, synthetic construct
  source 1..20: mol_type = other DNA
atcaagggagagaacgatgt

SEQ ID NO: 277724 - DNA, 20 bp, synthetic construct
  source 1..20: mol_type = other DNA
catcaagggagagaacgatg

SEQ ID NO: 277725 - DNA, 20 bp, synthetic construct
  source 1..20: mol_type = other DNA
ccatcaagggagagaacgat

SEQ ID NO: 277726 - DNA, 20 bp, synthetic construct
  source 1..20: mol_type = other DNA
accatcaagggagagaacga

SEQ ID NO: 277727 - DNA, 20 bp, synthetic construct
  source 1..20: mol_type = other DNA
aaccatcaagggagagaacg

SEQ ID NO: 277728 - DNA, 20 bp, synthetic construct
  source 1..20: mol_type = other DNA
aaaccatcaagggagagaac

SEQ ID NO: 277729 - DNA, 20 bp, synthetic construct
  source 1..20: mol_type = other DNA
aaaaccatcaagggagagaa

SEQ ID NO: 277730 - DNA, 20 bp, synthetic construct
  source 1..20: mol_type = other DNA
aaaaaccatcaagggagaga

SEQ ID NO: 277731 - DNA, 20 bp, synthetic construct
  source 1..20: mol_type = other DNA
caaaaaccatcaagggagag

SEQ ID NO: 277732 - DNA, 20 bp, synthetic construct
  source 1..20: mol_type = other DNA
acaaaaaccatcaagggaga

SEQ ID NO: 277733 - DNA, 20 bp, synthetic construct
  source 1..20: mol_type = other DNA
gacaaaaaccatcaagggag

SEQ ID NO: 277734 - DNA, 20 bp, synthetic construct
  source 1..20: mol_type = other DNA
tgacaaaaaccatcaaggga

SEQ ID NO: 277735 - DNA, 20 bp, synthetic construct
  source 1..20: mol_type = other DNA
ctgacaaaaaccatcaaggg

SEQ ID NO: 277736 - DNA, 20 bp, synthetic construct
  source 1..20: mol_type = other DNA
actgacaaaaaccatcaagg

SEQ ID NO: 277737 - DNA, 20 bp, synthetic construct
  source 1..20: mol_type = other DNA
cactgacaaaaaccatcaag

SEQ ID NO: 277738 - DNA, 20 bp, synthetic construct
  source 1..20: mol_type = other DNA
acactgacaaaaaccatcaa

SEQ ID NO: 277739 - DNA, 20 bp, synthetic construct
  source 1..20: mol_type = other DNA
gacactgacaaaaaccatca

SEQ ID NO: 277740 - DNA, 20 bp, synthetic construct
  source 1..20: mol_type = other DNA
agacactgacaaaaaccatc

SEQ ID NO: 277741 - DNA, 20 bp, synthetic construct
  source 1..20: mol_type = other DNA
tagacactgacaaaaaccat

SEQ ID NO: 277742 - DNA, 20 bp, synthetic construct
  source 1..20: mol_type = other DNA
atagacactgacaaaaacca

SEQ ID NO: 277743 - DNA, 20 bp, synthetic construct
  source 1..20: mol_type = other DNA
gatagacactgacaaaaacc

SEQ ID NO: 277744 - DNA, 20 bp, synthetic construct
  source 1..20: mol_type = other DNA
ggatagacactgacaaaaac

SEQ ID NO: 277745 - DNA, 20 bp, synthetic construct
  source 1..20: mol_type = other DNA
tggatagacactgacaaaaa

SEQ ID NO: 277746 - DNA, 20 bp, synthetic construct
  source 1..20: mol_type = other DNA
ctggatagacactgacaaaa

SEQ ID NO: 277747 - DNA, 20 bp, synthetic construct
  source 1..20: mol_type = other DNA
tctggatagacactgacaaa

SEQ ID NO: 277748 - DNA, 20 bp, synthetic construct
  source 1..20: mol_type = other DNA
ctctggatagacactgacaa

SEQ ID NO: 277749 - DNA, 20 bp, synthetic construct
  source 1..20: mol_type = other DNA
gctctggatagacactgaca

SEQ ID NO: 277750 - DNA, 20 bp, synthetic construct
  source 1..20: mol_type = other DNA
agctctggatagacactgac

SEQ ID NO: 277751 - DNA, 20 bp, synthetic construct
  source 1..20: mol_type = other DNA
cagctctggatagacactga

SEQ ID NO: 277752 - DNA, 20 bp, synthetic construct
  source 1..20: mol_type = other DNA
tcagctctggatagacactg

SEQ ID NO: 277753 - DNA, 20 bp, synthetic construct
  source 1..20: mol_type = other DNA
ttcagctctggatagacact

SEQ ID NO: 277754 - DNA, 20 bp, synthetic construct
  source 1..20: mol_type = other DNA
cttcagctctggatagacac

SEQ ID NO: 277755 - DNA, 20 bp, synthetic construct
  source 1..20: mol_type = other DNA
acttcagctctggatagaca

SEQ ID NO: 277756 - DNA, 20 bp, synthetic construct
  source 1..20: mol_type = other DNA
cacttcagctctggatagac

SEQ ID NO: 277757 - DNA, 20 bp, synthetic construct
  source 1..20: mol_type = other DNA
acacttcagctctggataga

SEQ ID NO: 277758 - DNA, 20 bp, synthetic construct
  source 1..20: mol_type = other DNA
tacacttcagctctggatag

SEQ ID NO: 277759 - DNA, 20 bp, synthetic construct
  source 1..20: mol_type = other DNA
ttacacttcagctctggata

SEQ ID NO: 277760 - DNA, 20 bp, synthetic construct
  source 1..20: mol_type = other DNA
attacacttcagctctggat

SEQ ID NO: 277761 - DNA, 20 bp, synthetic construct
  source 1..20: mol_type = other DNA
tattacacttcagctctgga

SEQ ID NO: 277762 - DNA, 20 bp, synthetic construct
  source 1..20: mol_type = other DNA
atattacacttcagctctgg

SEQ ID NO: 277763 - DNA, 20 bp, synthetic construct
  source 1..20: mol_type = other DNA
tatattacacttcagctctg

SEQ ID NO: 277764 - DNA, 20 bp, synthetic construct
  source 1..20: mol_type = other DNA
atatattacacttcagctct

SEQ ID NO: 277765 - DNA, 20 bp, synthetic construct
  source 1..20: mol_type = other DNA
tatatattacacttcagctc

SEQ ID NO: 277766 - DNA, 20 bp, synthetic construct
  source 1..20: mol_type = other DNA
atatatattacacttcagct

SEQ ID NO: 277767 - DNA, 20 bp, synthetic construct
  source 1..20: mol_type = other DNA
catatatattacacttcagc

SEQ ID NO: 277768 - DNA, 20 bp, synthetic construct
  source 1..20: mol_type = other DNA
acatatatattacacttcag

SEQ ID NO: 277769 - DNA, 20 bp, synthetic construct
  source 1..20: mol_type = other DNA
aacatatatattacacttca

SEQ ID NO: 277770 - DNA, 20 bp, synthetic construct
  source 1..20: mol_type = other DNA
taacatatatattacacttc

SEQ ID NO: 277771 - DNA, 20 bp, synthetic construct
  source 1..20: mol_type = other DNA
gtaacatatatattacactt

SEQ ID NO: 277772 - DNA, 20 bp, synthetic construct
  source 1..20: mol_type = other DNA
agtaacatatatattacact

SEQ ID NO: 277773 - DNA, 20 bp, synthetic construct
  source 1..20: mol_type = other DNA
cagtaacatatatattacac

SEQ ID NO: 277774 - DNA, 20 bp, synthetic construct
  source 1..20: mol_type = other DNA
acagtaacatatatattaca

SEQ ID NO: 277775 - DNA, 20 bp, synthetic construct
  source 1..20: mol_type = other DNA
tacagtaacatatatattac

SEQ ID NO: 277776 - DNA, 20 bp, synthetic construct
  source 1..20: mol_type = other DNA
ctacagtaacatatatatta

SEQ ID NO: 277777 - DNA, 20 bp, synthetic construct
  source 1..20: mol_type = other DNA
gctacagtaacatatatatt

SEQ ID NO: 277778 - DNA, 20 bp, synthetic construct
  source 1..20: mol_type = other DNA
agctacagtaacatatatat

SEQ ID NO: 277779 - DNA, 20 bp, synthetic construct
  source 1..20: mol_type = other DNA
cagctacagtaacatatata

SEQ ID NO: 277780 - DNA, 20 bp, synthetic construct
  source 1..20: mol_type = other DNA
tcagctacagtaacatatat

SEQ ID NO: 277781 - DNA, 20 bp, synthetic construct
  source 1..20: mol_type = other DNA
ctcagctacagtaacatata

SEQ ID NO: 277782 - DNA, 20 bp, synthetic construct
  source 1..20: mol_type = other DNA
tctcagctacagtaacatat

SEQ ID NO: 277783 - DNA, 20 bp, synthetic construct
  source 1..20: mol_type = other DNA
ttctcagctacagtaacata

SEQ ID NO: 277784 - DNA, 20 bp, synthetic construct
  source 1..20: mol_type = other DNA
tttctcagctacagtaacat

SEQ ID NO: 277785 - DNA, 20 bp, synthetic construct
  source 1..20: mol_type = other DNA
atttctcagctacagtaaca

SEQ ID NO: 277786 - DNA, 20 bp, synthetic construct
  source 1..20: mol_type = other DNA
aatttctcagctacagtaac

SEQ ID NO: 277787 - DNA, 20 bp, synthetic construct
  source 1..20: mol_type = other DNA
taatttctcagctacagtaa

SEQ ID NO: 277788 - DNA, 20 bp, synthetic construct
  source 1..20: mol_type = other DNA
ttaatttctcagctacagta

SEQ ID NO: 277789 - DNA, 20 bp, synthetic construct
  source 1..20: mol_type = other DNA
tttaatttctcagctacagt

SEQ ID NO: 277790 - DNA, 20 bp, synthetic construct
  source 1..20: mol_type = other DNA
atttaatttctcagctacag

SEQ ID NO: 277791 - DNA, 20 bp, synthetic construct
  source 1..20: mol_type = other DNA
aatttaatttctcagctaca

SEQ ID NO: 277792 - DNA, 20 bp, synthetic construct
  source 1..20: mol_type = other DNA
aaatttaatttctcagctac

SEQ ID NO: 277793 - DNA, 20 bp, synthetic construct
  source 1..20: mol_type = other DNA
gaaatttaatttctcagcta

SEQ ID NO: 277794 - DNA, 20 bp, synthetic construct
  source 1..20: mol_type = other DNA
tgaaatttaatttctcagct

SEQ ID NO: 277795 - DNA, 20 bp, synthetic construct
  source 1..20: mol_type = other DNA
ctgaaatttaatttctcagc

SEQ ID NO: 277796 - DNA, 20 bp, synthetic construct
  source 1..20: mol_type = other DNA
cctgaaatttaatttctcag

SEQ ID NO: 277797 - DNA, 20 bp, synthetic construct
  source 1..20: mol_type = other DNA
tcctgaaatttaatttctca

SEQ ID NO: 277798 - DNA, 20 bp, synthetic construct
  source 1..20: mol_type = other DNA
atcctgaaatttaatttctc

SEQ ID NO: 277799 - DNA, 20 bp, synthetic construct
  source 1..20: mol_type = other DNA
aatcctgaaatttaatttct

SEQ ID NO: 277800 - DNA, 20 bp, synthetic construct
  source 1..20: mol_type = other DNA
gaatcctgaaatttaatttc

SEQ ID NO: 277801 - DNA, 20 bp, synthetic construct
  source 1..20: mol_type = other DNA
agaatcctgaaatttaattt

SEQ ID NO: 277802 - DNA, 20 bp, synthetic construct
  source 1..20: mol_type = other DNA
cagaatcctgaaatttaatt

SEQ ID NO: 277803 - DNA, 20 bp, synthetic construct
  source 1..20: mol_type = other DNA
tcagaatcctgaaatttaat

SEQ ID NO: 277804 - DNA, 20 bp, synthetic construct
  source 1..20: mol_type = other DNA
atcagaatcctgaaatttaa

SEQ ID NO: 277805 - DNA, 20 bp, synthetic construct
  source 1..20: mol_type = other DNA
aatcagaatcctgaaattta

SEQ ID NO: 277806 - DNA, 20 bp, synthetic construct
  source 1..20: mol_type = other DNA
aaatcagaatcctgaaattt

SEQ ID NO: 277807 - DNA, 20 bp, synthetic construct
  source 1..20: mol_type = other DNA
gaaatcagaatcctgaaatt

SEQ ID NO: 277808 - DNA, 20 bp, synthetic construct
  source 1..20: mol_type = other DNA
tgaaatcagaatcctgaaat

SEQ ID NO: 277809 - DNA, 20 bp, synthetic construct
  source 1..20: mol_type = other DNA
atgaaatcagaatcctgaaa

SEQ ID NO: 277810 - DNA, 20 bp, synthetic construct
  source 1..20: mol_type = other DNA
tatgaaatcagaatcctgaa

SEQ ID NO: 277811 - DNA, 20 bp, synthetic construct
  source 1..20: mol_type = other DNA
ttatgaaatcagaatcctga

SEQ ID NO: 277812 - DNA, 20 bp, synthetic construct
  source 1..20: mol_type = other DNA
attatgaaatcagaatcctg

SEQ ID NO: 277813 - DNA, 20 bp, synthetic construct
  source 1..20: mol_type = other DNA
cattatgaaatcagaatcct

SEQ ID NO: 277814 - DNA, 20 bp, synthetic construct
  source 1..20: mol_type = other DNA
tcattatgaaatcagaatcc

SEQ ID NO: 277815 - DNA, 20 bp, synthetic construct
  source 1..20: mol_type = other DNA
gtcattatgaaatcagaatc

SEQ ID NO: 277816 - DNA, 20 bp, synthetic construct
  source 1..20: mol_type = other DNA
tgtcattatgaaatcagaat

SEQ ID NO: 277817 - DNA, 20 bp, synthetic construct
  source 1..20: mol_type = other DNA
ttgtcattatgaaatcagaa

SEQ ID NO: 277818 - DNA, 20 bp, synthetic construct
  source 1..20: mol_type = other DNA
gttgtcattatgaaatcaga

SEQ ID NO: 277819 - DNA, 20 bp, synthetic construct
  source 1..20: mol_type = other DNA
ggttgtcattatgaaatcag

SEQ ID NO: 277820 - DNA, 20 bp, synthetic construct
  source 1..20: mol_type = other DNA
tggttgtcattatgaaatca

SEQ ID NO: 277821 - DNA, 20 bp, synthetic construct
  source 1..20: mol_type = other DNA
atggttgtcattatgaaatc

SEQ ID NO: 277822 - DNA, 20 bp, synthetic construct
  source 1..20: mol_type = other DNA
aatggttgtcattatgaaat

SEQ ID NO: 277823 - DNA, 20 bp, synthetic construct
  source 1..20: mol_type = other DNA
gaatggttgtcattatgaaa

SEQ ID NO: 277824 - DNA, 20 bp, synthetic construct
  source 1..20: mol_type = other DNA
ggaatggttgtcattatgaa

SEQ ID NO: 277825 - DNA, 20 bp, synthetic construct
  source 1..20: mol_type = other DNA
aggaatggttgtcattatga

SEQ ID NO: 277826 - DNA, 20 bp, synthetic construct
  source 1..20: mol_type = other DNA
gaggaatggttgtcattatg

SEQ ID NO: 277827 - DNA, 20 bp, synthetic construct
  source 1..20: mol_type = other DNA
agaggaatggttgtcattat

SEQ ID NO: 277828 - DNA, 20 bp, synthetic construct
  source 1..20: mol_type = other DNA
aagaggaatggttgtcatta

SEQ ID NO: 277829 - DNA, 20 bp, synthetic construct
  source 1..20: mol_type = other DNA
aaagaggaatggttgtcatt

SEQ ID NO: 277830 - DNA, 20 bp, synthetic construct
  source 1..20: mol_type = other DNA
aaaagaggaatggttgtcat

SEQ ID NO: 277831 - DNA, 20 bp, synthetic construct
  source 1..20: mol_type = other DNA
gaaaagaggaatggttgtca

SEQ ID NO: 277832 - DNA, 20 bp, synthetic construct
  source 1..20: mol_type = other DNA
agaaaagaggaatggttgtc

SEQ ID NO: 277833 - DNA, 20 bp, synthetic construct
  source 1..20: mol_type = other DNA
gagaaaagaggaatggttgt

SEQ ID NO: 277834 - DNA, 20 bp, synthetic construct
  source 1..20: mol_type = other DNA
agagaaaagaggaatggttg

SEQ ID NO: 277835 - DNA, 20 bp, synthetic construct
  source 1..20: mol_type = other DNA
gagagaaaagaggaatggtt

SEQ ID NO: 277836 - DNA, 20 bp, synthetic construct
  source 1..20: mol_type = other DNA
ggagagaaaagaggaatggt

SEQ ID NO: 277837 - DNA, 20 bp, synthetic construct
  source 1..20: mol_type = other DNA
gggagagaaaagaggaatgg

SEQ ID NO: 277838 - DNA, 20 bp, synthetic construct
  source 1..20: mol_type = other DNA
agggagagaaaagaggaatg

SEQ ID NO: 277839 - DNA, 20 bp, synthetic construct
  source 1..20: mol_type = other DNA
aagggagagaaaagaggaat

SEQ ID NO: 277840 - DNA, 20 bp, synthetic construct
  source 1..20: mol_type = other DNA
gaagggagagaaaagaggaa

SEQ ID NO: 277841 - DNA, 20 bp, synthetic construct
  source 1..20: mol_type = other DNA
agaagggagagaaaagagga

SEQ ID NO: 277842 - DNA, 20 bp, synthetic construct
  source 1..20: mol_type = other DNA
cagaagggagagaaaagagg

SEQ ID NO: 277843 - DNA, 20 bp, synthetic construct
  source 1..20: mol_type = other DNA
acagaagggagagaaaagag

SEQ ID NO: 277844 - DNA, 20 bp, synthetic construct
  source 1..20: mol_type = other DNA
tacagaagggagagaaaaga

SEQ ID NO: 277845 - DNA, 20 bp, synthetic construct
  source 1..20: mol_type = other DNA
ttacagaagggagagaaaag

SEQ ID NO: 277846 - DNA, 20 bp, synthetic construct
  source 1..20: mol_type = other DNA
tttacagaagggagagaaaa

SEQ ID NO: 277847 - DNA, 20 bp, synthetic construct
  source 1..20: mol_type = other DNA
atttacagaagggagagaaa

SEQ ID NO: 277848 - DNA, 20 bp, synthetic construct
  source 1..20: mol_type = other DNA
gatttacagaagggagagaa

SEQ ID NO: 277849 - DNA, 20 bp, synthetic construct
  source 1..20: mol_type = other DNA
agatttacagaagggagaga

SEQ ID NO: 277850 - DNA, 20 bp, synthetic construct
  source 1..20: mol_type = other DNA
tagatttacagaagggagag

SEQ ID NO: 277851 - DNA, 20 bp, synthetic construct
  source 1..20: mol_type = other DNA
ttagatttacagaagggaga

SEQ ID NO: 277852 - DNA, 20 bp, synthetic construct
  source 1..20: mol_type = other DNA
cttagatttacagaagggag

SEQ ID NO: 277853 - DNA, 20 bp, synthetic construct
  source 1..20: mol_type = other DNA
tcttagatttacagaaggga

SEQ ID NO: 277854 - DNA, 20 bp, synthetic construct
  source 1..20: mol_type = other DNA
atcttagatttacagaaggg

SEQ ID NO: 277855 - DNA, 20 bp, synthetic construct
  source 1..20: mol_type = other DNA
aatcttagatttacagaagg

SEQ ID NO: 277856 - DNA, 20 bp, synthetic construct
  source 1..20: mol_type = other DNA
gaatcttagatttacagaag

SEQ ID NO: 277857 - DNA, 20 bp, synthetic construct
  source 1..20: mol_type = other DNA
agaatcttagatttacagaa

SEQ ID NO: 277858 - DNA, 20 bp, synthetic construct
  source 1..20: mol_type = other DNA
tagaatcttagatttacaga

SEQ ID NO: 277859 - DNA, 20 bp, synthetic construct
  source 1..20: mol_type = other DNA
atagaatcttagatttacag

SEQ ID NO: 277860 - DNA, 20 bp, synthetic construct
  source 1..20: mol_type = other DNA
tatagaatcttagatttaca

SEQ ID NO: 277861 - DNA, 20 bp, synthetic construct
  source 1..20: mol_type = other DNA
ttatagaatcttagatttac

SEQ ID NO: 277862 - DNA, 20 bp, synthetic construct
  source 1..20: mol_type = other DNA
tttatagaatcttagattta

SEQ ID NO: 277863 - DNA, 20 bp, synthetic construct
  source 1..20: mol_type = other DNA
gtttatagaatcttagattt

SEQ ID NO: 277864 - DNA, 20 bp, synthetic construct
  source 1..20: mol_type = other DNA
cgtttatagaatcttagatt

SEQ ID NO: 277865 - DNA, 20 bp, synthetic construct
  source 1..20: mol_type = other DNA
ccgtttatagaatcttagat

SEQ ID NO: 277866 - DNA, 20 bp, synthetic construct
  source 1..20: mol_type = other DNA
accgtttatagaatcttaga

SEQ ID NO: 277867 - DNA, 20 bp, synthetic construct
  source 1..20: mol_type = other DNA
caccgtttatagaatcttag

SEQ ID NO: 277868 - DNA, 20 bp, synthetic construct
  source 1..20: mol_type = other DNA
acaccgtttatagaatctta

SEQ ID NO: 277869 - DNA, 20 bp, synthetic construct
  source 1..20: mol_type = other DNA
aacaccgtttatagaatctt

SEQ ID NO: 277870 - DNA, 20 bp, synthetic construct
  source 1..20: mol_type = other DNA
caacaccgtttatagaatct

SEQ ID NO: 277871 - DNA, 20 bp, synthetic construct
  source 1..20: mol_type = other DNA
tcaacaccgtttatagaatc

SEQ ID NO: 277872 - DNA, 20 bp, synthetic construct
  source 1..20: mol_type = other DNA
gtcaacaccgtttatagaat

SEQ ID NO: 277873 - DNA, 20 bp, synthetic construct
  source 1..20: mol_type = other DNA
agtcaacaccgtttatagaa

SEQ ID NO: 277874 - DNA, 20 bp, synthetic construct
  source 1..20: mol_type = other DNA
aagtcaacaccgtttataga

SEQ ID NO: 277875 - DNA, 20 bp, synthetic construct
  source 1..20: mol_type = other DNA
taagtcaacaccgtttatag

SEQ ID NO: 277876 - DNA, 20 bp, synthetic construct
  source 1..20: mol_type = other DNA
ttaagtcaacaccgtttata

SEQ ID NO: 277877 - DNA, 20 bp, synthetic construct
  source 1..20: mol_type = other DNA
attaagtcaacaccgtttat

SEQ ID NO: 277878 - DNA, 20 bp, synthetic construct
  source 1..20: mol_type = other DNA
cattaagtcaacaccgttta

SEQ ID NO: 277879 - DNA, 20 bp, synthetic construct
  source 1..20: mol_type = other DNA
acattaagtcaacaccgttt

SEQ ID NO: 277880 - DNA, 20 bp, synthetic construct
  source 1..20: mol_type = other DNA
cacattaagtcaacaccgtt

SEQ ID NO: 277881 - DNA, 20 bp, synthetic construct
  source 1..20: mol_type = other DNA
tcacattaagtcaacaccgt

SEQ ID NO: 277882 - DNA, 20 bp, synthetic construct
  source 1..20: mol_type = other DNA
gtcacattaagtcaacaccg

SEQ ID NO: 277883 - DNA, 20 bp, synthetic construct
  source 1..20: mol_type = other DNA
tgtcacattaagtcaacacc

SEQ ID NO: 277884 - DNA, 20 bp, synthetic construct
  source 1..20: mol_type = other DNA
ttgtcacattaagtcaacac

SEQ ID NO: 277885 - DNA, 20 bp, synthetic construct
  source 1..20: mol_type = other DNA
attgtcacattaagtcaaca

SEQ ID NO: 277886 - DNA, 20 bp, synthetic construct
  source 1..20: mol_type = other DNA
aattgtcacattaagtcaac

SEQ ID NO: 277887 - DNA, 20 bp, synthetic construct
  source 1..20: mol_type = other DNA
caattgtcacattaagtcaa

SEQ ID NO: 277888 - DNA, 20 bp, synthetic construct
  source 1..20: mol_type = other DNA
ccaattgtcacattaagtca

SEQ ID NO: 277889 - DNA, 20 bp, synthetic construct
  source 1..20: mol_type = other DNA
gccaattgtcacattaagtc

SEQ ID NO: 277890 - DNA, 20 bp, synthetic construct
  source 1..20: mol_type = other DNA
tgccaattgtcacattaagt

SEQ ID NO: 277891 - DNA, 20 bp, synthetic construct
  source 1..20: mol_type = other DNA
ctgccaattgtcacattaag

SEQ ID NO: 277892 - DNA, 20 bp, synthetic construct
  source 1..20: mol_type = other DNA
actgccaattgtcacattaa

SEQ ID NO: 277893 - DNA, 20 bp, synthetic construct
  source 1..20: mol_type = other DNA
tactgccaattgtcacatta

SEQ ID NO: 277894 - DNA, 20 bp, synthetic construct
  source 1..20: mol_type = other DNA
ctactgccaattgtcacatt

SEQ ID NO: 277895 - DNA, 20 bp, synthetic construct
  source 1..20: mol_type = other DNA
actactgccaattgtcacat

SEQ ID NO: 277896 - DNA, 20 bp, synthetic construct
  source 1..20: mol_type = other DNA
aactactgccaattgtcaca

SEQ ID NO: 277897 - DNA, 20 bp, synthetic construct
  source 1..20: mol_type = other DNA
gaactactgccaattgtcac

SEQ ID NO: 277898 - DNA, 20 bp, synthetic construct
  source 1..20: mol_type = other DNA
tgaactactgccaattgtca

SEQ ID NO: 277899 - DNA, 20 bp, synthetic construct
  source 1..20: mol_type = other DNA
ctgaactactgccaattgtc

SEQ ID NO: 277900 - DNA, 20 bp, synthetic construct
  source 1..20: mol_type = other DNA
cctgaactactgccaattgt

SEQ ID NO: 277901 - DNA, 20 bp, synthetic construct
  source 1..20: mol_type = other DNA
acctgaactactgccaattg

SEQ ID NO: 277902 - DNA, 20 bp, synthetic construct
  source 1..20: mol_type = other DNA
gacctgaactactgccaatt

SEQ ID NO: 277903 - DNA, 20 bp, synthetic construct
  source 1..20: mol_type = other DNA
agacctgaactactgccaat

SEQ ID NO: 277904 - DNA, 20 bp, synthetic construct
  source 1..20: mol_type = other DNA
cagacctgaactactgccaa

SEQ ID NO: 277905 - DNA, 20 bp, synthetic construct
  source 1..20: mol_type = other DNA
gcagacctgaactactgcca

SEQ ID NO: 277906 - DNA, 20 bp, synthetic construct
  source 1..20: mol_type = other DNA
agcagacctgaactactgcc

SEQ ID NO: 277907 - DNA, 20 bp, synthetic construct
  source 1..20: mol_type = other DNA
aagcagacctgaactactgc

SEQ ID NO: 277908 - DNA, 20 bp, synthetic construct
  source 1..20: mol_type = other DNA
aaagcagacctgaactactg

SEQ ID NO: 277909 - DNA, 20 bp, synthetic construct
  source 1..20: mol_type = other DNA
caaagcagacctgaactact

SEQ ID NO: 277910 - DNA, 20 bp, synthetic construct
  source 1..20: mol_type = other DNA
acaaagcagacctgaactac

SEQ ID NO: 277911 - DNA, 20 bp, synthetic construct
  source 1..20: mol_type = other DNA
tacaaagcagacctgaacta

SEQ ID NO: 277912 - DNA, 20 bp, synthetic construct
  source 1..20: mol_type = other DNA
ttacaaagcagacctgaact

SEQ ID NO: 277913 - DNA, 20 bp, synthetic construct
  source 1..20: mol_type = other DNA
tttacaaagcagacctgaac

SEQ ID NO: 277914 - DNA, 20 bp, synthetic construct
  source 1..20: mol_type = other DNA
atttacaaagcagacctgaa

SEQ ID NO: 277915 - DNA, 20 bp, synthetic construct
  source 1..20: mol_type = other DNA
tatttacaaagcagacctga

SEQ ID NO: 277916 - DNA, 20 bp, synthetic construct
  source 1..20: mol_type = other DNA
gtatttacaaagcagacctg

SEQ ID NO: 277917 - DNA, 20 bp, synthetic construct
  source 1..20: mol_type = other DNA
ggtatttacaaagcagacct

SEQ ID NO: 277918 - DNA, 20 bp, synthetic construct
  source 1..20: mol_type = other DNA
gggtatttacaaagcagacc

SEQ ID NO: 277919 - DNA, 20 bp, synthetic construct
  source 1..20: mol_type = other DNA
agggtatttacaaagcagac

SEQ ID NO: 277920 - DNA, 20 bp, synthetic construct
  source 1..20: mol_type = other DNA
aagggtatttacaaagcaga

SEQ ID NO: 277921 - DNA, 20 bp, synthetic construct
  source 1..20: mol_type = other DNA
caagggtatttacaaagcag

SEQ ID NO: 277922 - DNA, 20 bp, synthetic construct
  source 1..20: mol_type = other DNA
acaagggtatttacaaagca

SEQ ID NO: 277923 - DNA, 20 bp, synthetic construct
  source 1..20: mol_type = other DNA
cacaagggtatttacaaagc

SEQ ID NO: 277924 - DNA, 20 bp, synthetic construct
  source 1..20: mol_type = other DNA
acacaagggtatttacaaag

SEQ ID NO: 277925 - DNA, 20 bp, synthetic construct
  source 1..20: mol_type = other DNA
gacacaagggtatttacaaa

SEQ ID NO: 277926 - DNA, 20 bp, synthetic construct
  source 1..20: mol_type = other DNA
agacacaagggtatttacaa

SEQ ID NO: 277927 - DNA, 20 bp, synthetic construct
  source 1..20: mol_type = other DNA
tagacacaagggtatttaca

SEQ ID NO: 277928 - DNA, 20 bp, synthetic construct
  source 1..20: mol_type = other DNA
atagacacaagggtatttac

SEQ ID NO: 277929 - DNA, 20 bp, synthetic construct
  source 1..20: mol_type = other DNA
aatagacacaagggtattta

SEQ ID NO: 277930 - DNA, 20 bp, synthetic construct
  source 1..20: mol_type = other DNA
caatagacacaagggtattt

SEQ ID NO: 277931 - DNA, 20 bp, synthetic construct
  source 1..20: mol_type = other DNA
acaatagacacaagggtatt

SEQ ID NO: 277932 - DNA, 20 bp, synthetic construct
  source 1..20: mol_type = other DNA
tacaatagacacaagggtat

SEQ ID NO: 277933 - DNA, 20 bp, synthetic construct
  source 1..20: mol_type = other DNA
ttacaatagacacaagggta

SEQ ID NO: 277934 - DNA, 20 bp, synthetic construct
  source 1..20: mol_type = other DNA
tttacaatagacacaagggt

SEQ ID NO: 277935 - DNA, 20 bp, synthetic construct
  source 1..20: mol_type = other DNA
ttttacaatagacacaaggg

SEQ ID NO: 277936 - DNA, 20 bp, synthetic construct
  source 1..20: mol_type = other DNA
attttacaatagacacaagg

SEQ ID NO: 277937 - DNA, 20 bp, synthetic construct
  source 1..20: mol_type = other DNA
gattttacaatagacacaag

SEQ ID NO: 277938 - DNA, 20 bp, synthetic construct
  source 1..20: mol_type = other DNA
agattttacaatagacacaa

SEQ ID NO: 277939 - DNA, 20 bp, synthetic construct
  source 1..20: mol_type = other DNA
gagattttacaatagacaca

SEQ ID NO: 277940 - DNA, 20 bp, synthetic construct
  source 1..20: mol_type = other DNA
tgagattttacaatagacac

SEQ ID NO: 277941 - DNA, 20 bp, synthetic construct
  source 1..20: mol_type = other DNA
gtgagattttacaatagaca

SEQ ID NO: 277942 - DNA, 20 bp, synthetic construct
  source 1..20: mol_type = other DNA
tgtgagattttacaatagac

SEQ ID NO: 277943 - DNA, 20 bp, synthetic construct
  source 1..20: mol_type = other DNA
ttgtgagattttacaataga

SEQ ID NO: 277944 - DNA, 20 bp, synthetic construct
  source 1..20: mol_type = other DNA
tttgtgagattttacaatag

SEQ ID NO: 277945 - DNA, 20 bp, synthetic construct
  source 1..20: mol_type = other DNA
ctttgtgagattttacaata

SEQ ID NO: 277946 - DNA, 20 bp, synthetic construct
  source 1..20: mol_type = other DNA
cctttgtgagattttacaat

SEQ ID NO: 277947 - DNA, 20 bp, synthetic construct
  source 1..20: mol_type = other DNA
gcctttgtgagattttacaa

SEQ ID NO: 277948 - DNA, 20 bp, synthetic construct
  source 1..20: mol_type = other DNA
agcctttgtgagattttaca

SEQ ID NO: 277949 - DNA, 20 bp, synthetic construct
  source 1..20: mol_type = other DNA
aagcctttgtgagattttac

SEQ ID NO: 277950 - DNA, 20 bp, synthetic construct
  source 1..20: mol_type = other DNA
caagcctttgtgagatttta

SEQ ID NO: 277951 - DNA, 20 bp, synthetic construct
  source 1..20: mol_type = other DNA
acaagcctttgtgagatttt

SEQ ID NO: 277952 - DNA, 20 bp, synthetic construct
  source 1..20: mol_type = other DNA
aacaagcctttgtgagattt

SEQ ID NO: 277953 - DNA, 20 bp, synthetic construct
  source 1..20: mol_type = other DNA
caacaagcctttgtgagatt

SEQ ID NO: 277954 - DNA, 20 bp, synthetic construct
  source 1..20: mol_type = other DNA
gcaacaagcctttgtgagat

SEQ ID NO: 277955 - DNA, 20 bp, synthetic construct
  source 1..20: mol_type = other DNA
ggcaacaagcctttgtgaga

SEQ ID NO: 277956 - DNA, 20 bp, synthetic construct
  source 1..20: mol_type = other DNA
aggcaacaagcctttgtgag

SEQ ID NO: 277957 - DNA, 20 bp, synthetic construct
  source 1..20: mol_type = other DNA
aaggcaacaagcctttgtga

SEQ ID NO: 277958 - DNA, 20 bp, synthetic construct
  source 1..20: mol_type = other DNA
aaaggcaacaagcctttgtg

SEQ ID NO: 277959 - DNA, 20 bp, synthetic construct
  source 1..20: mol_type = other DNA
aaaaggcaacaagcctttgt

SEQ ID NO: 277960 - DNA, 20 bp, synthetic construct
  source 1..20: mol_type = other DNA
aaaaaggcaacaagcctttg

SEQ ID NO: 277961 - DNA, 20 bp, synthetic construct
  source 1..20: mol_type = other DNA
aaaaaaggcaacaagccttt

SEQ ID NO: 277962 - DNA, 20 bp, synthetic construct
  source 1..20: mol_type = other DNA
caaaaaaggcaacaagcctt

SEQ ID NO: 277963 - DNA, 20 bp, synthetic construct
  source 1..20: mol_type = other DNA
acaaaaaaggcaacaagcct

SEQ ID NO: 277964 - DNA, 20 bp, synthetic construct
  source 1..20: mol_type = other DNA
cacaaaaaaggcaacaagcc

SEQ ID NO: 277965 - DNA, 20 bp, synthetic construct
  source 1..20: mol_type = other DNA
ccacaaaaaaggcaacaagc

SEQ ID NO: 277966 - DNA, 20 bp, synthetic construct
  source 1..20: mol_type = other DNA
cccacaaaaaaggcaacaag

SEQ ID NO: 277967 - DNA, 20 bp, synthetic construct
  source 1..20: mol_type = other DNA
ccccacaaaaaaggcaacaa

SEQ ID NO: 277968 - DNA, 20 bp, synthetic construct
  source 1..20: mol_type = other DNA
accccacaaaaaaggcaaca

SEQ ID NO: 277969 - DNA, 20 bp, synthetic construct
  source 1..20: mol_type = other DNA
aaccccacaaaaaaggcaac

SEQ ID NO: 277970 - DNA, 20 bp, synthetic construct
  source 1..20: mol_type = other DNA
taaccccacaaaaaaggcaa

SEQ ID NO: 277971 - DNA, 20 bp, synthetic construct
  source 1..20: mol_type = other DNA
ctaaccccacaaaaaaggca

SEQ ID NO: 277972 - DNA, 20 bp, synthetic construct
  source 1..20: mol_type = other DNA
tctaaccccacaaaaaaggc

SEQ ID NO: 277973 - DNA, 20 bp, synthetic construct
  source 1..20: mol_type = other DNA
ttctaaccccacaaaaaagg

SEQ ID NO: 277974 - DNA, 20 bp, synthetic construct
  source 1..20: mol_type = other DNA
gttctaaccccacaaaaaag

SEQ ID NO: 277975 - DNA, 20 bp, synthetic construct
  source 1..20: mol_type = other DNA
tgttctaaccccacaaaaaa

SEQ ID NO: 277976 - DNA, 20 bp, synthetic construct
  source 1..20: mol_type = other DNA
ttgttctaaccccacaaaaa

SEQ ID NO: 277977 - DNA, 20 bp, synthetic construct
  source 1..20: mol_type = other DNA
cttgttctaaccccacaaaa

SEQ ID NO: 277978 - DNA, 20 bp, synthetic construct
  source 1..20: mol_type = other DNA
tcttgttctaaccccacaaa

SEQ ID NO: 277979 - DNA, 20 bp, synthetic construct
  source 1..20: mol_type = other DNA
ttcttgttctaaccccacaa

SEQ ID NO: 277980 - DNA, 20 bp, synthetic construct
  source 1..20: mol_type = other DNA
tttcttgttctaaccccaca

SEQ ID NO: 277981 - DNA, 20 bp, synthetic construct
  source 1..20: mol_type = other DNA
ttttcttgttctaaccccac

SEQ ID NO: 277982 - DNA, 20 bp, synthetic construct
  source 1..20: mol_type = other DNA
tttttcttgttctaacccca

SEQ ID NO: 277983 - DNA, 20 bp, synthetic construct
  source 1..20: mol_type = other DNA
ctttttcttgttctaacccc

SEQ ID NO: 277984 - DNA, 20 bp, synthetic construct
  source 1..20: mol_type = other DNA
gctttttcttgttctaaccc

SEQ ID NO: 277985 - DNA, 20 bp, synthetic construct
  source 1..20: mol_type = other DNA
ggctttttcttgttctaacc

SEQ ID NO: 277986 - DNA, 20 bp, synthetic construct
  source 1..20: mol_type = other DNA
tggctttttcttgttctaac

SEQ ID NO: 277987 - DNA, 20 bp, synthetic construct
  source 1..20: mol_type = other DNA
gtggctttttcttgttctaa

SEQ ID NO: 277988 - DNA, 20 bp, synthetic construct
  source 1..20: mol_type = other DNA
tgtggctttttcttgttcta

SEQ ID NO: 277989 - DNA, 20 bp, synthetic construct
  source 1..20: mol_type = other DNA
atgtggctttttcttgttct

SEQ ID NO: 277990 - DNA, 20 bp, synthetic construct
  source 1..20: mol_type = other DNA
catgtggctttttcttgttc

SEQ ID NO: 277991 - DNA, 20 bp, synthetic construct
  source 1..20: mol_type = other DNA
ccatgtggctttttcttgtt

SEQ ID NO: 277992 - DNA, 20 bp, synthetic construct
  source 1..20: mol_type = other DNA
tccatgtggctttttcttgt

SEQ ID NO: 277993 - DNA, 20 bp, synthetic construct
  source 1..20: mol_type = other DNA
ttccatgtggctttttcttg

SEQ ID NO: 277994 - DNA, 20 bp, synthetic construct
  source 1..20: mol_type = other DNA
tttccatgtggctttttctt

SEQ ID NO: 277995 - DNA, 20 bp, synthetic construct
  source 1..20: mol_type = other DNA
ttttccatgtggctttttct

SEQ ID NO: 277996 - DNA, 20 bp, synthetic construct
  source 1..20: mol_type = other DNA
tttttccatgtggctttttc

SEQ ID NO: 277997 - DNA, 20 bp, synthetic construct
  source 1..20: mol_type = other DNA
ttttttccatgtggcttttt

SEQ ID NO: 277998 - DNA, 20 bp, synthetic construct
  source 1..20: mol_type = other DNA
tttttttccatgtggctttt

SEQ ID NO: 277999 - DNA, 20 bp, synthetic construct
  source 1..20: mol_type = other DNA
ttttttttccatgtggcttt

SEQ ID NO: 278000 - DNA, 20 bp, synthetic construct
  source 1..20: mol_type = other DNA
attttttttccatgtggctt

SEQ ID NO: 278001 - DNA, 20 bp, synthetic construct
  source 1..20: mol_type = other DNA
aattttttttccatgtggct

SEQ ID NO: 278002 - DNA, 20 bp, synthetic construct
  source 1..20: mol_type = other DNA
aaattttttttccatgtggc

SEQ ID NO: 278003 - DNA, 20 bp, synthetic construct
  source 1..20: mol_type = other DNA
gaaattttttttccatgtgg

SEQ ID NO: 278004 - DNA, 20 bp, synthetic construct
  source 1..20: mol_type = other DNA
agaaattttttttccatgtg

SEQ ID NO: 278005 - DNA, 20 bp, synthetic construct
  source 1..20: mol_type = other DNA
aagaaattttttttccatgt

SEQ ID NO: 278006 - DNA, 20 bp, synthetic construct
  source 1..20: mol_type = other DNA
aaagaaattttttttccatg

SEQ ID NO: 278007 - DNA, 20 bp, synthetic construct
  source 1..20: mol_type = other DNA
aaaagaaattttttttccat

SEQ ID NO: 278008 - DNA, 20 bp, synthetic construct
  source 1..20: mol_type = other DNA
aaaaagaaattttttttcca

SEQ ID NO: 278009 - DNA, 20 bp, synthetic construct
  source 1..20: mol_type = other DNA
aaaaaagaaattttttttcc

SEQ ID NO: 278010 - DNA, 20 bp, synthetic construct
  source 1..20: mol_type = other DNA
caaaaaagaaattttttttc

SEQ ID NO: 278011 - DNA, 20 bp, synthetic construct
  source 1..20: mol_type = other DNA
acaaaaaagaaatttttttt

SEQ ID NO: 278012 - DNA, 20 bp, synthetic construct
  source 1..20: mol_type = other DNA
aacaaaaaagaaattttttt

SEQ ID NO: 278013 - DNA, 20 bp, synthetic construct
  source 1..20: mol_type = other DNA
aaacaaaaaagaaatttttt

SEQ ID NO: 278014 - DNA, 20 bp, synthetic construct
  source 1..20: mol_type = other DNA
aaaacaaaaaagaaattttt

SEQ ID NO: 278015 - DNA, 20 bp, synthetic construct
  source 1..20: mol_type = other DNA
aaaaacaaaaaagaaatttt

SEQ ID NO: 278016 - DNA, 20 bp, synthetic construct
  source 1..20: mol_type = other DNA
aaaaaacaaaaaagaaattt

SEQ ID NO: 278017 - DNA, 20 bp, synthetic construct
  source 1..20: mol_type = other DNA
aaaaaaacaaaaaagaaatt

SEQ ID NO: 278018 - DNA, 20 bp, synthetic construct
  source 1..20: mol_type = other DNA
caaaaaaacaaaaaagaaat

SEQ ID NO: 278019 - DNA, 20 bp, synthetic construct
  source 1..20: mol_type = other DNA
acaaaaaaacaaaaaagaaa

SEQ ID NO: 278020 - DNA, 20 bp, synthetic construct
  source 1..20: mol_type = other DNA
aacaaaaaaacaaaaaagaa

SEQ ID NO: 278021 - DNA, 20 bp, synthetic construct
  source 1..20: mol_type = other DNA
aaacaaaaaaacaaaaaaga

SEQ ID NO: 278022 - DNA, 20 bp, synthetic construct
  source 1..20: mol_type = other DNA
caaacaaaaaaacaaaaaag

SEQ ID NO: 278023 - DNA, 20 bp, synthetic construct
  source 1..20: mol_type = other DNA
gcaaacaaaaaaacaaaaaa

SEQ ID NO: 278024 - DNA, 20 bp, synthetic construct
  source 1..20: mol_type = other DNA
agcaaacaaaaaaacaaaaa

SEQ ID NO: 278025 - DNA, 20 bp, synthetic construct
  source 1..20: mol_type = other DNA
aagcaaacaaaaaaacaaaa

SEQ ID NO: 278026 - DNA, 20 bp, synthetic construct
  source 1..20: mol_type = other DNA
caagcaaacaaaaaaacaaa

SEQ ID NO: 278027 - DNA, 20 bp, synthetic construct
  source 1..20: mol_type = other DNA
acaagcaaacaaaaaaacaa

SEQ ID NO: 278028 - DNA, 20 bp, synthetic construct
  source 1..20: mol_type = other DNA
aacaagcaaacaaaaaaaca

SEQ ID NO: 278029 - DNA, 20 bp, synthetic construct
  source 1..20: mol_type = other DNA
aaacaagcaaacaaaaaaac

SEQ ID NO: 278030 - DNA, 20 bp, synthetic construct
  source 1..20: mol_type = other DNA
aaaacaagcaaacaaaaaaa

SEQ ID NO: 278031 - DNA, 20 bp, synthetic construct
  source 1..20: mol_type = other DNA
aaaaacaagcaaacaaaaaa

SEQ ID NO: 278032 - DNA, 20 bp, synthetic construct
  source 1..20: mol_type = other DNA
aaaaaacaagcaaacaaaaa

SEQ ID NO: 278033 - DNA, 20 bp, synthetic construct
  source 1..20: mol_type = other DNA
aaaaaaacaagcaaacaaaa

SEQ ID NO: 278034 - DNA, 20 bp, synthetic construct
  source 1..20: mol_type = other DNA
caaaaaaacaagcaaacaaa

SEQ ID NO: 278035 - DNA, 20 bp, synthetic construct
  source 1..20: mol_type = other DNA
tcaaaaaaacaagcaaacaa

SEQ ID NO: 278036 - DNA, 20 bp, synthetic construct
  source 1..20: mol_type = other DNA
ctcaaaaaaacaagcaaaca

SEQ ID NO: 278037 - DNA, 20 bp, synthetic construct
  source 1..20: mol_type = other DNA
tctcaaaaaaacaagcaaac

SEQ ID NO: 278038 - DNA, 20 bp, synthetic construct
  source 1..20: mol_type = other DNA
gtctcaaaaaaacaagcaaa

SEQ ID NO: 278039 - DNA, 20 bp, synthetic construct
  source 1..20: mol_type = other DNA
tgtctcaaaaaaacaagcaa

SEQ ID NO: 278040 - DNA, 20 bp, synthetic construct
  source 1..20: mol_type = other DNA
ctgtctcaaaaaaacaagca

SEQ ID NO: 278041 - DNA, 20 bp, synthetic construct
  source 1..20: mol_type = other DNA
tctgtctcaaaaaaacaagc

SEQ ID NO: 278042 - DNA, 20 bp, synthetic construct
  source 1..20: mol_type = other DNA
ctctgtctcaaaaaaacaag

SEQ ID NO: 278043 - DNA, 20 bp, synthetic construct
  source 1..20: mol_type = other DNA
actctgtctcaaaaaaacaa

SEQ ID NO: 278044 - DNA, 20 bp, synthetic construct
  source 1..20: mol_type = other DNA
aactctgtctcaaaaaaaca

SEQ ID NO: 278045 - DNA, 20 bp, synthetic construct
  source 1..20: mol_type = other DNA
aaactctgtctcaaaaaaac

SEQ ID NO: 278046 - DNA, 20 bp, synthetic construct
  source 1..20: mol_type = other DNA
gaaactctgtctcaaaaaaa

SEQ ID NO: 278047 - DNA, 20 bp, synthetic construct
  source 1..20: mol_type = other DNA
tgaaactctgtctcaaaaaa

SEQ ID NO: 278048 - DNA, 20 bp, synthetic construct
  source 1..20: mol_type = other DNA
gtgaaactctgtctcaaaaa

SEQ ID NO: 278049 - DNA, 20 bp, synthetic construct
  source 1..20: mol_type = other DNA
agtgaaactctgtctcaaaa

SEQ ID NO: 278050 - DNA, 20 bp, synthetic construct
  source 1..20: mol_type = other DNA
gagtgaaactctgtctcaaa

SEQ ID NO: 278051 - DNA, 20 bp, synthetic construct
  source 1..20: mol_type = other DNA
agagtgaaactctgtctcaa

SEQ ID NO: 278052 - DNA, 20 bp, synthetic construct
  source 1..20: mol_type = other DNA
cagagtgaaactctgtctca

SEQ ID NO: 278053 - DNA, 20 bp, synthetic construct
  source 1..20: mol_type = other DNA
acagagtgaaactctgtctc

SEQ ID NO: 278054 - DNA, 20 bp, synthetic construct
  source 1..20: mol_type = other DNA
gacagagtgaaactctgtct

SEQ ID NO: 278055 - DNA, 20 bp, synthetic construct
  source 1..20: mol_type = other DNA
cgacagagtgaaactctgtc

SEQ ID NO: 278056 - DNA, 20 bp, synthetic construct
  source 1..20: mol_type = other DNA
gcgacagagtgaaactctgt

SEQ ID NO: 278057 - DNA, 20 bp, synthetic construct
  source 1..20: mol_type = other DNA
ggcgacagagtgaaactctg

SEQ ID NO: 278058 - DNA, 20 bp, synthetic construct
  source 1..20: mol_type = other DNA
gggcgacagagtgaaactct

SEQ ID NO: 278059 - DNA, 20 bp, synthetic construct
  source 1..20: mol_type = other DNA
tgggcgacagagtgaaactc

SEQ ID NO: 278060 - DNA, 20 bp, synthetic construct
  source 1..20: mol_type = other DNA
ctgggcgacagagtgaaact

SEQ ID NO: 278061 - DNA, 20 bp, synthetic construct
  source 1..20: mol_type = other DNA
cctgggcgacagagtgaaac

SEQ ID NO: 278062 - DNA, 20 bp, synthetic construct
  source 1..20: mol_type = other DNA
gcctgggcgacagagtgaaa

SEQ ID NO: 278063 - DNA, 20 bp, synthetic construct
  source 1..20: mol_type = other DNA
agcctgggcgacagagtgaa

SEQ ID NO: 278064 - DNA, 20 bp, synthetic construct
  source 1..20: mol_type = other DNA
cagcctgggcgacagagtga

SEQ ID NO: 278065 - DNA, 20 bp, synthetic construct
  source 1..20: mol_type = other DNA
ccagcctgggcgacagagtg

SEQ ID NO: 278066 - DNA, 20 bp, synthetic construct
  source 1..20: mol_type = other DNA
tccagcctgggcgacagagt

SEQ ID NO: 278067 - DNA, 20 bp, synthetic construct
  source 1..20: mol_type = other DNA
ctccagcctgggcgacagag

SEQ ID NO: 278068 - DNA, 20 bp, synthetic construct
  source 1..20: mol_type = other DNA
actccagcctgggcgacaga

SEQ ID NO: 278069 - DNA, 20 bp, synthetic construct
  source 1..20: mol_type = other DNA
cactccagcctgggcgacag

SEQ ID NO: 278070 - DNA, 20 bp, synthetic construct
  source 1..20: mol_type = other DNA
gcactccagcctgggcgaca

SEQ ID NO: 278071 - DNA, 20 bp, synthetic construct
  source 1..20: mol_type = other DNA
tgcactccagcctgggcgac

SEQ ID NO: 278072 - DNA, 20 bp, synthetic construct
  source 1..20: mol_type = other DNA
ctgcactccagcctgggcga

SEQ ID NO: 278073 - DNA, 20 bp, synthetic construct
  source 1..20: mol_type = other DNA
actgcactccagcctgggcg

SEQ ID NO: 278074 - DNA, 20 bp, synthetic construct
  source 1..20: mol_type = other DNA
cactgcactccagcctgggc

SEQ ID NO: 278075 - DNA, 20 bp, synthetic construct
  source 1..20: mol_type = other DNA
ccactgcactccagcctggg

SEQ ID NO: 278076 - DNA, 20 bp, synthetic construct
  source 1..20: mol_type = other DNA
accactgcactccagcctgg

SEQ ID NO: 278077 - DNA, 20 bp, synthetic construct
  source 1..20: mol_type = other DNA
caccactgcactccagcctg

SEQ ID NO: 278078 - DNA, 20 bp, synthetic construct
  source 1..20: mol_type = other DNA
gcaccactgcactccagcct

SEQ ID NO: 278079 - DNA, 20 bp, synthetic construct
  source 1..20: mol_type = other DNA
cgcaccactgcactccagcc

SEQ ID NO: 278080 - DNA, 20 bp, synthetic construct
  source 1..20: mol_type = other DNA
tcgcaccactgcactccagc

SEQ ID NO: 278081 - DNA, 20 bp, synthetic construct
  source 1..20: mol_type = other DNA
atcgcaccactgcactccag

SEQ ID NO: 278082 - DNA, 20 bp, synthetic construct
  source 1..20: mol_type = other DNA
gatcgcaccactgcactcca

SEQ ID NO: 278083 - DNA, 20 bp, synthetic construct
  source 1..20: mol_type = other DNA
agatcgcaccactgcactcc

SEQ ID NO: 278084 - DNA, 20 bp, synthetic construct
  source 1..20: mol_type = other DNA
gagatcgcaccactgcactc

SEQ ID NO: 278085 - DNA, 20 bp, synthetic construct
  source 1..20: mol_type = other DNA
ggagatcgcaccactgcact

SEQ ID NO: 278086 - DNA, 20 bp, synthetic construct
  source 1..20: mol_type = other DNA
cggagatcgcaccactgcac

SEQ ID NO: 278087 - DNA, 20 bp, synthetic construct
  source 1..20: mol_type = other DNA
gcggagatcgcaccactgca

SEQ ID NO: 278088 - DNA, 20 bp, synthetic construct
  source 1..20: mol_type = other DNA
ggcggagatcgcaccactgc

SEQ ID NO: 278089 - DNA, 20 bp, synthetic construct
  source 1..20: mol_type = other DNA
gggcggagatcgcaccactg

SEQ ID NO: 278090 - DNA, 20 bp, synthetic construct
  source 1..20: mol_type = other DNA
tgggcggagatcgcaccact

SEQ ID NO: 278091 - DNA, 20 bp, synthetic construct
  source 1..20: mol_type = other DNA
gtgggcggagatcgcaccac

SEQ ID NO: 278092 - DNA, 20 bp, synthetic construct
  source 1..20: mol_type = other DNA
agtgggcggagatcgcacca

SEQ ID NO: 278093 - DNA, 20 bp, synthetic construct
  source 1..20: mol_type = other DNA
cagtgggcggagatcgcacc

SEQ ID NO: 278094 - DNA, 20 bp, synthetic construct
  source 1..20: mol_type = other DNA
gcagtgggcggagatcgcac

SEQ ID NO: 278095 - DNA, 20 bp, synthetic construct
  source 1..20: mol_type = other DNA
tgcagtgggcggagatcgca

SEQ ID NO: 278096 - DNA, 20 bp, synthetic construct
  source 1..20: mol_type = other DNA
ttgcagtgggcggagatcgc

SEQ ID NO: 278097 - DNA, 20 bp, synthetic construct
  source 1..20: mol_type = other DNA
cttgcagtgggcggagatcg

SEQ ID NO: 278098 - DNA, 20 bp, synthetic construct
  source 1..20: mol_type = other DNA
gcttgcagtgggcggagatc

SEQ ID NO: 278099 - DNA, 20 bp, synthetic construct
  source 1..20: mol_type = other DNA
agcttgcagtgggcggagat

SEQ ID NO: 278100 - DNA, 20 bp, synthetic construct
  source 1..20: mol_type = other DNA
gagcttgcagtgggcggaga

SEQ ID NO: 278101 - DNA, 20 bp, synthetic construct
  source 1..20: mol_type = other DNA
ggagcttgcagtgggcggag

SEQ ID NO: 278102 - DNA, 20 bp, synthetic construct
  source 1..20: mol_type = other DNA
tggagcttgcagtgggcgga

SEQ ID NO: 278103 - DNA, 20 bp, synthetic construct
  source 1..20: mol_type = other DNA
gtggagcttgcagtgggcgg

SEQ ID NO: 278104 - DNA, 20 bp, synthetic construct
  source 1..20: mol_type = other DNA
ggtggagcttgcagtgggcg

SEQ ID NO: 278105 - DNA, 20 bp, synthetic construct
  source 1..20: mol_type = other DNA
aggtggagcttgcagtgggc

SEQ ID NO: 278106 - DNA, 20 bp, synthetic construct
  source 1..20: mol_type = other DNA
gaggtggagcttgcagtggg

SEQ ID NO: 278107 - DNA, 20 bp, synthetic construct
  source 1..20: mol_type = other DNA
ggaggtggagcttgcagtgg

SEQ ID NO: 278108 - DNA, 20 bp, synthetic construct
  source 1..20: mol_type = other DNA
gggaggtggagcttgcagtg

SEQ ID NO: 278109 - DNA, 20 bp, synthetic construct
  source 1..20: mol_type = other DNA
cgggaggtggagcttgcagt

SEQ ID NO: 278110 - DNA, 20 bp, synthetic construct
  source 1..20: mol_type = other DNA
ccgggaggtggagcttgcag

SEQ ID NO: 278111 - DNA, 20 bp, synthetic construct
  source 1..20: mol_type = other DNA
cccgggaggtggagcttgca

SEQ ID NO: 278112 - DNA, 20 bp, synthetic construct
  source 1..20: mol_type = other DNA
acccgggaggtggagcttgc

SEQ ID NO: 278113 - DNA, 20 bp, synthetic construct
  source 1..20: mol_type = other DNA
aacccgggaggtggagcttg

SEQ ID NO: 278114 - DNA, 20 bp, synthetic construct
  source 1..20: mol_type = other DNA
gaacccgggaggtggagctt

SEQ ID NO: 278115 - DNA, 20 bp, synthetic construct
  source 1..20: mol_type = other DNA
tgaacccgggaggtggagct

SEQ ID NO: 278116 - DNA, 20 bp, synthetic construct
  source 1..20: mol_type = other DNA
atgaacccgggaggtggagc

SEQ ID NO: 278117 - DNA, 20 bp, synthetic construct
  source 1..20: mol_type = other DNA
catgaacccgggaggtggag

SEQ ID NO: 278118 - DNA, 20 bp, synthetic construct
  source 1..20: mol_type = other DNA
gcatgaacccgggaggtgga

SEQ ID NO: 278119 - DNA, 20 bp, synthetic construct
  source 1..20: mol_type = other DNA
agcatgaacccgggaggtgg

SEQ ID NO: 278120 - DNA, 20 bp, synthetic construct
  source 1..20: mol_type = other DNA
tagcatgaacccgggaggtg

SEQ ID NO: 278121 - DNA, 20 bp, synthetic construct
  source 1..20: mol_type = other DNA
atagcatgaacccgggaggt

SEQ ID NO: 278122 - DNA, 20 bp, synthetic construct
  source 1..20: mol_type = other DNA
aatagcatgaacccgggagg

SEQ ID NO: 278123 - DNA, 20 bp, synthetic construct
  source 1..20: mol_type = other DNA
gaatagcatgaacccgggag

SEQ ID NO: 278124 - DNA, 20 bp, synthetic construct
  source 1..20: mol_type = other DNA
agaatagcatgaacccggga

SEQ ID NO: 278125 - DNA, 20 bp, synthetic construct
  source 1..20: mol_type = other DNA
gagaatagcatgaacccggg

SEQ ID NO: 278126 - DNA, 20 bp, synthetic construct
  source 1..20: mol_type = other DNA
ggagaatagcatgaacccgg

SEQ ID NO: 278127 - DNA, 20 bp, synthetic construct
  source 1..20: mol_type = other DNA
aggagaatagcatgaacccg

SEQ ID NO: 278128 - DNA, 20 bp, synthetic construct
  source 1..20: mol_type = other DNA
caggagaatagcatgaaccc

SEQ ID NO: 278129 - DNA, 20 bp, synthetic construct
  source 1..20: mol_type = other DNA
acaggagaatagcatgaacc

SEQ ID NO: 278130 - DNA, 20 bp, synthetic construct
  source 1..20: mol_type = other DNA
gacaggagaatagcatgaac

SEQ ID NO: 278131 - DNA, 20 bp, synthetic construct
  source 1..20: mol_type = other DNA
agacaggagaatagcatgaa

SEQ ID NO: 278132 - DNA, 20 bp, synthetic construct
  source 1..20: mol_type = other DNA
gagacaggagaatagcatga

SEQ ID NO: 278133 - DNA, 20 bp, synthetic construct
  source 1..20: mol_type = other DNA
tgagacaggagaatagcatg

SEQ ID NO: 278134 - DNA, 20 bp, synthetic construct
  source 1..20: mol_type = other DNA
ctgagacaggagaatagcat

SEQ ID NO: 278135 - DNA, 20 bp, synthetic construct
  source 1..20: mol_type = other DNA
gctgagacaggagaatagca

SEQ ID NO: 278136 - DNA, 20 bp, synthetic construct
  source 1..20: mol_type = other DNA
ggctgagacaggagaatagc

SEQ ID NO: 278137 - DNA, 20 bp, synthetic construct
  source 1..20: mol_type = other DNA
aggctgagacaggagaatag

SEQ ID NO: 278138 - DNA, 20 bp, synthetic construct
  source 1..20: mol_type = other DNA
gaggctgagacaggagaata

SEQ ID NO: 278139 - DNA, 20 bp, synthetic construct
  source 1..20: mol_type = other DNA
ggaggctgagacaggagaat

SEQ ID NO: 278140 - DNA, 20 bp, synthetic construct
  source 1..20: mol_type = other DNA
gggaggctgagacaggagaa

SEQ ID NO: 278141 - DNA, 20 bp, synthetic construct
  source 1..20: mol_type = other DNA
tgggaggctgagacaggaga

SEQ ID NO: 278142 - DNA, 20 bp, synthetic construct
  source 1..20: mol_type = other DNA
ttgggaggctgagacaggag

SEQ ID NO: 278143 - DNA, 20 bp, synthetic construct
  source 1..20: mol_type = other DNA
cttgggaggctgagacagga

SEQ ID NO: 278144 - DNA, 20 bp, synthetic construct
  source 1..20: mol_type = other DNA
acttgggaggctgagacagg

SEQ ID NO: 278145 - DNA, 20 bp, synthetic construct
  source 1..20: mol_type = other DNA
tacttgggaggctgagacag

SEQ ID NO: 278146 - DNA, 20 bp, synthetic construct
  source 1..20: mol_type = other DNA
ctacttgggaggctgagaca

SEQ ID NO: 278147 - DNA, 20 bp, synthetic construct
  source 1..20: mol_type = other DNA
gctacttgggaggctgagac

SEQ ID NO: 278148 - DNA, 20 bp, synthetic construct
  source 1..20: mol_type = other DNA
agctacttgggaggctgaga

SEQ ID NO: 278149 - DNA, 20 bp, synthetic construct
  source 1..20: mol_type = other DNA
cagctacttgggaggctgag

SEQ ID NO: 278150 - DNA, 20 bp, synthetic construct
  source 1..20: mol_type = other DNA
ccagctacttgggaggctga

SEQ ID NO: 278151 - DNA, 20 bp, synthetic construct
  source 1..20: mol_type = other DNA
cccagctacttgggaggctg

SEQ ID NO: 278152 - DNA, 20 bp, synthetic construct
  source 1..20: mol_type = other DNA
tcccagctacttgggaggct

SEQ ID NO: 278153 - DNA, 20 bp, synthetic construct
  source 1..20: mol_type = other DNA
gtcccagctacttgggaggc

SEQ ID NO: 278154 - DNA, 20 bp, synthetic construct
  source 1..20: mol_type = other DNA
agtcccagctacttgggagg

SEQ ID NO: 278155 - DNA, 20 bp, synthetic construct
  source 1..20: mol_type = other DNA
cagtcccagctacttgggag

SEQ ID NO: 278156 - DNA, 20 bp, synthetic construct
  source 1..20: mol_type = other DNA
gcagtcccagctacttggga

SEQ ID NO: 278157 - DNA, 20 bp, synthetic construct
  source 1..20: mol_type = other DNA
tgcagtcccagctacttggg

SEQ ID NO: 278158 - DNA, 20 bp, synthetic construct
  source 1..20: mol_type = other DNA
ctgcagtcccagctacttgg

SEQ ID NO: 278159 - DNA, 20 bp, synthetic construct
  source 1..20: mol_type = other DNA
cctgcagtcccagctacttg

SEQ ID NO: 278160 - DNA, 20 bp, synthetic construct
  source 1..20: mol_type = other DNA
acctgcagtcccagctactt

SEQ ID NO: 278161 - DNA, 20 bp, synthetic construct
  source 1..20: mol_type = other DNA
cacctgcagtcccagctact

SEQ ID NO: 278162 - DNA, 20 bp, synthetic construct
  source 1..20: mol_type = other DNA
gcacctgcagtcccagctac

SEQ ID NO: 278163 - DNA, 20 bp, synthetic construct
  source 1..20: mol_type = other DNA
ggcacctgcagtcccagcta

SEQ ID NO: 278164 - DNA, 20 bp, synthetic construct
  source 1..20: mol_type = other DNA
gggcacctgcagtcccagct

SEQ ID NO: 278165 - DNA, 20 bp, synthetic construct
  source 1..20: mol_type = other DNA
cgggcacctgcagtcccagc

SEQ ID NO: 278166 - DNA, 20 bp, synthetic construct
  source 1..20: mol_type = other DNA
gcgggcacctgcagtcccag

SEQ ID NO: 278167 - DNA, 20 bp, synthetic construct
  source 1..20: mol_type = other DNA
ggcgggcacctgcagtccca

SEQ ID NO: 278168 - DNA, 20 bp, synthetic construct
  source 1..20: mol_type = other DNA
tggcgggcacctgcagtccc

SEQ ID NO: 278169 - DNA, 20 bp, synthetic construct
  source 1..20: mol_type = other DNA
gtggcgggcacctgcagtcc

SEQ ID NO: 278170 - DNA, 20 bp, synthetic construct
  source 1..20: mol_type = other DNA
ggtggcgggcacctgcagtc

SEQ ID NO: 278171 - DNA, 20 bp, synthetic construct
  source 1..20: mol_type = other DNA
tggtggcgggcacctgcagt

SEQ ID NO: 278172 - DNA, 20 bp, synthetic construct
  source 1..20: mol_type = other DNA
gtggtggcgggcacctgcag

SEQ ID NO: 278173 - DNA, 20 bp, synthetic construct
  source 1..20: mol_type = other DNA
tgtggtggcgggcacctgca

SEQ ID NO: 278174 - DNA, 20 bp, synthetic construct
  source 1..20: mol_type = other DNA
gtgtggtggcgggcacctgc

SEQ ID NO: 278175 - DNA, 20 bp, synthetic construct
  source 1..20: mol_type = other DNA
ggtgtggtggcgggcacctg

SEQ ID NO: 278176 - DNA, 20 bp, synthetic construct
  source 1..20: mol_type = other DNA
aggtgtggtggcgggcacct

SEQ ID NO: 278177 - DNA, 20 bp, synthetic construct
  source 1..20: mol_type = other DNA
caggtgtggtggcgggcacc

SEQ ID NO: 278178 - DNA, 20 bp, synthetic construct
  source 1..20: mol_type = other DNA
ccaggtgtggtggcgggcac

SEQ ID NO: 278179 - DNA, 20 bp, synthetic construct
  source 1..20: mol_type = other DNA
gccaggtgtggtggcgggca

SEQ ID NO: 278180 - DNA, 20 bp, synthetic construct
  source 1..20: mol_type = other DNA
agccaggtgtggtggcgggc

SEQ ID NO: 278181 - DNA, 20 bp, synthetic construct
  source 1..20: mol_type = other DNA
tagccaggtgtggtggcggg

SEQ ID NO: 278182 - DNA, 20 bp, synthetic construct
  source 1..20: mol_type = other DNA
ttagccaggtgtggtggcgg

SEQ ID NO: 278183 - DNA, 20 bp, synthetic construct
  source 1..20: mol_type = other DNA
attagccaggtgtggtggcg

SEQ ID NO: 278184 - DNA, 20 bp, synthetic construct
  source 1..20: mol_type = other DNA
aattagccaggtgtggtggc

SEQ ID NO: 278185 - DNA, 20 bp, synthetic construct
  source 1..20: mol_type = other DNA
aaattagccaggtgtggtgg

SEQ ID NO: 278186 - DNA, 20 bp, synthetic construct
  source 1..20: mol_type = other DNA
aaaattagccaggtgtggtg

SEQ ID NO: 278187 - DNA, 20 bp, synthetic construct
  source 1..20: mol_type = other DNA
aaaaattagccaggtgtggt

SEQ ID NO: 278188 - DNA, 20 bp, synthetic construct
  source 1..20: mol_type = other DNA
aaaaaattagccaggtgtgg

SEQ ID NO: 278189 - DNA, 20 bp, synthetic construct
  source 1..20: mol_type = other DNA
aaaaaaattagccaggtgtg

SEQ ID NO: 278190 - DNA, 20 bp, synthetic construct
  source 1..20: mol_type = other DNA
caaaaaaattagccaggtgt

SEQ ID NO: 278191 - DNA, 20 bp, synthetic construct
  source 1..20: mol_type = other DNA
acaaaaaaattagccaggtg

SEQ ID NO: 278192 - DNA, 20 bp, synthetic construct
  source 1..20: mol_type = other DNA
tacaaaaaaattagccaggt

SEQ ID NO: 278193 - DNA, 20 bp, synthetic construct
  source 1..20: mol_type = other DNA
atacaaaaaaattagccagg

SEQ ID NO: 278194 - DNA, 20 bp, synthetic construct
  source 1..20: mol_type = other DNA
aatacaaaaaaattagccag

SEQ ID NO: 278195 - DNA, 20 bp, synthetic construct
  source 1..20: mol_type = other DNA
aaatacaaaaaaattagcca

SEQ ID NO: 278196 - DNA, 20 bp, synthetic construct
  source 1..20: mol_type = other DNA
aaaatacaaaaaaattagcc

SEQ ID NO: 278197 - DNA, 20 bp, synthetic construct
  source 1..20: mol_type = other DNA
aaaaatacaaaaaaattagc

SEQ ID NO: 278198 - DNA, 20 bp, synthetic construct
  source 1..20: mol_type = other DNA
taaaaatacaaaaaaattag

SEQ ID NO: 278199 - DNA, 20 bp, synthetic construct
  source 1..20: mol_type = other DNA
ctaaaaatacaaaaaaatta

SEQ ID NO: 278200 - DNA, 20 bp, synthetic construct
  source 1..20: mol_type = other DNA
actaaaaatacaaaaaaatt

SEQ ID NO: 278201 - DNA, 20 bp, synthetic construct
  source 1..20: mol_type = other DNA
tactaaaaatacaaaaaaat

SEQ ID NO: 278202 - DNA, 20 bp, synthetic construct
  source 1..20: mol_type = other DNA
ctactaaaaatacaaaaaaa

SEQ ID NO: 278203 - DNA, 20 bp, synthetic construct
  source 1..20: mol_type = other DNA
tctactaaaaatacaaaaaa

SEQ ID NO: 278204 - DNA, 20 bp, synthetic construct
  source 1..20: mol_type = other DNA
ctctactaaaaatacaaaaa

SEQ ID NO: 278205 - DNA, 20 bp, synthetic construct
  source 1..20: mol_type = other DNA
tctctactaaaaatacaaaa

SEQ ID NO: 278206 - DNA, 20 bp, synthetic construct
  source 1..20: mol_type = other DNA
gtctctactaaaaatacaaa

SEQ ID NO: 278207 - DNA, 20 bp, synthetic construct
  source 1..20: mol_type = other DNA
cgtctctactaaaaatacaa

SEQ ID NO: 278208 - DNA, 20 bp, synthetic construct
  source 1..20: mol_type = other DNA
ccgtctctactaaaaataca

SEQ ID NO: 278209 - DNA, 20 bp, synthetic construct
  source 1..20: mol_type = other DNA
cccgtctctactaaaaatac

SEQ ID NO: 278210 - DNA, 20 bp, synthetic construct
  source 1..20: mol_type = other DNA
ccccgtctctactaaaaata

SEQ ID NO: 278211 - DNA, 20 bp, synthetic construct
  source 1..20: mol_type = other DNA
accccgtctctactaaaaat

SEQ ID NO: 278212 - DNA, 20 bp, synthetic construct
  source 1..20: mol_type = other DNA
aaccccgtctctactaaaaa

SEQ ID NO: 278213 - DNA, 20 bp, synthetic construct
  source 1..20: mol_type = other DNA
aaaccccgtctctactaaaa

SEQ ID NO: 278214 - DNA, 20 bp, synthetic construct
  source 1..20: mol_type = other DNA
gaaaccccgtctctactaaa

SEQ ID NO: 278215 - DNA, 20 bp, synthetic construct
  source 1..20: mol_type = other DNA
tgaaaccccgtctctactaa

SEQ ID NO: 278216 - DNA, 20 bp, synthetic construct
  source 1..20: mol_type = other DNA
gtgaaaccccgtctctacta

SEQ ID NO: 278217 - DNA, 20 bp, synthetic construct
  source 1..20: mol_type = other DNA
ggtgaaaccccgtctctact

SEQ ID NO: 278218 - DNA, 20 bp, synthetic construct
  source 1..20: mol_type = other DNA
cggtgaaaccccgtctctac

SEQ ID NO: 278219 - DNA, 20 bp, synthetic construct
  source 1..20: mol_type = other DNA
acggtgaaaccccgtctcta

SEQ ID NO: 278220 - DNA, 20 bp, synthetic construct
  source 1..20: mol_type = other DNA
cacggtgaaaccccgtctct

SEQ ID NO: 278221 - DNA, 20 bp, synthetic construct
  source 1..20: mol_type = other DNA
acacggtgaaaccccgtctc

SEQ ID NO: 278222 - DNA, 20 bp, synthetic construct
  source 1..20: mol_type = other DNA
aacacggtgaaaccccgtct

SEQ ID NO: 278223 - DNA, 20 bp, synthetic construct
  source 1..20: mol_type = other DNA
taacacggtgaaaccccgtc

SEQ ID NO: 278224 - DNA, 20 bp, synthetic construct
  source 1..20: mol_type = other DNA
ctaacacggtgaaaccccgt

SEQ ID NO: 278225 - DNA, 20 bp, synthetic construct
  source 1..20: mol_type = other DNA
gctaacacggtgaaaccccg

SEQ ID NO: 278226 - DNA, 20 bp, synthetic construct
  source 1..20: mol_type = other DNA
ggctaacacggtgaaacccc

SEQ ID NO: 278227 - DNA, 20 bp, synthetic construct
  source 1..20: mol_type = other DNA
tggctaacacggtgaaaccc

SEQ ID NO: 278228 - DNA, 20 bp, synthetic construct
  source 1..20: mol_type = other DNA
ctggctaacacggtgaaacc

SEQ ID NO: 278229 - DNA, 20 bp, synthetic construct
  source 1..20: mol_type = other DNA
cctggctaacacggtgaaac

SEQ ID NO: 278230 - DNA, 20 bp, synthetic construct
  source 1..20: mol_type = other DNA
tcctggctaacacggtgaaa

SEQ ID NO: 278231 - DNA, 20 bp, synthetic construct
  source 1..20: mol_type = other DNA
atcctggctaacacggtgaa

SEQ ID NO: 278232 - DNA, 20 bp, synthetic construct
  source 1..20: mol_type = other DNA
catcctggctaacacggtga

SEQ ID NO: 278233 - DNA, 20 bp, synthetic construct
  source 1..20: mol_type = other DNA
ccatcctggctaacacggtg

SEQ ID NO: 278234 - DNA, 20 bp, synthetic construct
  source 1..20: mol_type = other DNA
accatcctggctaacacggt

SEQ ID NO: 278235 - DNA, 20 bp, synthetic construct
  source 1..20: mol_type = other DNA
gaccatcctggctaacacgg

SEQ ID NO: 278236 - DNA, 20 bp, synthetic construct
  source 1..20: mol_type = other DNA
agaccatcctggctaacacg

SEQ ID NO: 278237 - DNA, 20 bp, synthetic construct
  source 1..20: mol_type = other DNA
gagaccatcctggctaacac

SEQ ID NO: 278238 - DNA, 20 bp, synthetic construct
  source 1..20: mol_type = other DNA
tgagaccatcctggctaaca

SEQ ID NO: 278239 - DNA, 20 bp, synthetic construct
  source 1..20: mol_type = other DNA
ttgagaccatcctggctaac

SEQ ID NO: 278240 - DNA, 20 bp, synthetic construct
  source 1..20: mol_type = other DNA
attgagaccatcctggctaa

SEQ ID NO: 278241 - DNA, 20 bp, synthetic construct
  source 1..20: mol_type = other DNA
gattgagaccatcctggcta

SEQ ID NO: 278242 - DNA, 20 bp, synthetic construct
  source 1..20: mol_type = other DNA
agattgagaccatcctggct

SEQ ID NO: 278243 - DNA, 20 bp, synthetic construct
  source 1..20: mol_type = other DNA
gagattgagaccatcctggc

SEQ ID NO: 278244 - DNA, 20 bp, synthetic construct
  source 1..20: mol_type = other DNA
ggagattgagaccatcctgg

SEQ ID NO: 278245 - DNA, 20 bp, synthetic construct
  source 1..20: mol_type = other DNA
aggagattgagaccatcctg

SEQ ID NO: 278246 - DNA, 20 bp, synthetic construct
  source 1..20: mol_type = other DNA
caggagattgagaccatcct

SEQ ID NO: 278247 - DNA, 20 bp, synthetic construct
  source 1..20: mol_type = other DNA
tcaggagattgagaccatcc

SEQ ID NO: 278248 - DNA, 20 bp, synthetic construct
  source 1..20: mol_type = other DNA
gtcaggagattgagaccatc

SEQ ID NO: 278249 - DNA, 20 bp, synthetic construct
  source 1..20: mol_type = other DNA
ggtcaggagattgagaccat

SEQ ID NO: 278250 - DNA, 20 bp, synthetic construct
  source 1..20: mol_type = other DNA
aggtcaggagattgagacca

SEQ ID NO: 278251 - DNA, 20 bp, synthetic construct
  source 1..20: mol_type = other DNA
gaggtcaggagattgagacc

SEQ ID NO: 278252 - DNA, 20 bp, synthetic construct
  source 1..20: mol_type = other DNA
cgaggtcaggagattgagac

SEQ ID NO: 278253 - DNA, 20 bp, synthetic construct
  source 1..20: mol_type = other DNA
acgaggtcaggagattgaga

SEQ ID NO: 278254 - DNA, 20 bp, synthetic construct
  source 1..20: mol_type = other DNA
gacgaggtcaggagattgag

SEQ ID NO: 278255 - DNA, 20 bp, synthetic construct
  source 1..20: mol_type = other DNA
tgacgaggtcaggagattga

SEQ ID NO: 278256 - DNA, 20 bp, synthetic construct
  source 1..20: mol_type = other DNA
atgacgaggtcaggagattg

SEQ ID NO: 278257 - DNA, 20 bp, synthetic construct
  source 1..20: mol_type = other DNA
gatgacgaggtcaggagatt

SEQ ID NO: 278258 - DNA, 20 bp, synthetic construct
  source 1..20: mol_type = other DNA
agatgacgaggtcaggagat

SEQ ID NO: 278259 - DNA, 20 bp, synthetic construct
  source 1..20: mol_type = other DNA
cagatgacgaggtcaggaga

SEQ ID NO: 278260 - DNA, 20 bp, synthetic construct
  source 1..20: mol_type = other DNA
gcagatgacgaggtcaggag

SEQ ID NO: 278261 - DNA, 20 bp, synthetic construct
  source 1..20: mol_type = other DNA
ggcagatgacgaggtcagga

SEQ ID NO: 278262 - DNA, 20 bp, synthetic construct
  source 1..20: mol_type = other DNA
aggcagatgacgaggtcagg

SEQ ID NO: 278263 - DNA, 20 bp, synthetic construct
  source 1..20: mol_type = other DNA
caggcagatgacgaggtcag

SEQ ID NO: 278264 - DNA, 20 bp, synthetic construct
  source 1..20: mol_type = other DNA
gcaggcagatgacgaggtca

SEQ ID NO: 278265 - DNA, 20 bp, synthetic construct
  source 1..20: mol_type = other DNA
ggcaggcagatgacgaggtc

SEQ ID NO: 278266 - DNA, 20 bp, synthetic construct
  source 1..20: mol_type = other DNA
aggcaggcagatgacgaggt

SEQ ID NO: 278267 - DNA, 20 bp, synthetic construct
  source 1..20: mol_type = other DNA
gaggcaggcagatgacgagg

SEQ ID NO: 278268 - DNA, 20 bp, synthetic construct
  source 1..20: mol_type = other DNA
cgaggcaggcagatgacgag

SEQ ID NO: 278269 - DNA, 20 bp, synthetic construct
  source 1..20: mol_type = other DNA
ccgaggcaggcagatgacga

SEQ ID NO: 278270 - DNA, 20 bp, synthetic construct
  source 1..20: mol_type = other DNA
gccgaggcaggcagatgacg

SEQ ID NO: 278271 - DNA, 20 bp, synthetic construct
  source 1..20: mol_type = other DNA
ggccgaggcaggcagatgac

SEQ ID NO: 278272 - DNA, 20 bp, synthetic construct
  source 1..20: mol_type = other DNA
aggccgaggcaggcagatga

SEQ ID NO: 278273 - DNA, 20 bp, synthetic construct
  source 1..20: mol_type = other DNA
gaggccgaggcaggcagatg

SEQ ID NO: 278274 - DNA, 20 bp, synthetic construct
  source 1..20: mol_type = other DNA
ggaggccgaggcaggcagat

SEQ ID NO: 278275 - DNA, 20 bp, synthetic construct
  source 1..20: mol_type = other DNA
gggaggccgaggcaggcaga

SEQ ID NO: 278276 - DNA, 20 bp, synthetic construct
  source 1..20: mol_type = other DNA
tgggaggccgaggcaggcag

SEQ ID NO: 278277 - DNA, 20 bp, synthetic construct
  source 1..20: mol_type = other DNA
ttgggaggccgaggcaggca

SEQ ID NO: 278278 - DNA, 20 bp, synthetic construct
  source 1..20: mol_type = other DNA
tttgggaggccgaggcaggc

SEQ ID NO: 278279 - DNA, 20 bp, synthetic construct
  source 1..20: mol_type = other DNA
ctttgggaggccgaggcagg

SEQ ID NO: 278280 - DNA, 20 bp, synthetic construct
  source 1..20: mol_type = other DNA
actttgggaggccgaggcag

SEQ ID NO: 278281 - DNA, 20 bp, synthetic construct
  source 1..20: mol_type = other DNA
cactttgggaggccgaggca

SEQ ID NO: 278282 - DNA, 20 bp, synthetic construct
  source 1..20: mol_type = other DNA
gcactttgggaggccgaggc

SEQ ID NO: 278283 - DNA, 20 bp, synthetic construct
  source 1..20: mol_type = other DNA
agcactttgggaggccgagg

SEQ ID NO: 278284 - DNA, 20 bp, synthetic construct
  source 1..20: mol_type = other DNA
cagcactttgggaggccgag

SEQ ID NO: 278285 - DNA, 20 bp, synthetic construct
  source 1..20: mol_type = other DNA
tcagcactttgggaggccga

SEQ ID NO: 278286 - DNA, 20 bp, synthetic construct
  source 1..20: mol_type = other DNA
ctcagcactttgggaggccg

SEQ ID NO: 278287 - DNA, 20 bp, synthetic construct
  source 1..20: mol_type = other DNA
tctcagcactttgggaggcc

SEQ ID NO: 278288 - DNA, 20 bp, synthetic construct
  source 1..20: mol_type = other DNA
atctcagcactttgggaggc

SEQ ID NO: 278289 - DNA, 20 bp, synthetic construct
  source 1..20: mol_type = other DNA
aatctcagcactttgggagg

SEQ ID NO: 278290 - DNA, 20 bp, synthetic construct
  source 1..20: mol_type = other DNA
taatctcagcactttgggag

SEQ ID NO: 278291 - DNA, 20 bp, synthetic construct
  source 1..20: mol_type = other DNA
gtaatctcagcactttggga

SEQ ID NO: 278292 - DNA, 20 bp, synthetic construct
  source 1..20: mol_type = other DNA
tgtaatctcagcactttggg

SEQ ID NO: 278293 - DNA, 20 bp, synthetic construct
  source 1..20: mol_type = other DNA
ctgtaatctcagcactttgg

SEQ ID NO: 278294 - DNA, 20 bp, synthetic construct
  source 1..20: mol_type = other DNA
cctgtaatctcagcactttg

SEQ ID NO: 278295 - DNA, 20 bp, synthetic construct
  source 1..20: mol_type = other DNA
gcctgtaatctcagcacttt

SEQ ID NO: 278296 - DNA, 20 bp, synthetic construct
  source 1..20: mol_type = other DNA
cgcctgtaatctcagcactt

SEQ ID NO: 278297 - DNA, 20 bp, synthetic construct
  source 1..20: mol_type = other DNA
acgcctgtaatctcagcact

SEQ ID NO: 278298 - DNA, 20 bp, synthetic construct
  source 1..20: mol_type = other DNA
cacgcctgtaatctcagcac

SEQ ID NO: 278299 - DNA, 20 bp, synthetic construct
  source 1..20: mol_type = other DNA
tcacgcctgtaatctcagca

SEQ ID NO: 278300 - DNA, 20 bp, synthetic construct
  source 1..20: mol_type = other DNA
ctcacgcctgtaatctcagc

SEQ ID NO: 278301 - DNA, 20 bp, synthetic construct
  source 1..20: mol_type = other DNA
gctcacgcctgtaatctcag

SEQ ID NO: 278302 - DNA, 20 bp, synthetic construct
  source 1..20: mol_type = other DNA
ggctcacgcctgtaatctca

SEQ ID NO: 278303 - DNA, 20 bp, synthetic construct
  source 1..20: mol_type = other DNA
tggctcacgcctgtaatctc

SEQ ID NO: 278304 - DNA, 20 bp, synthetic construct
  source 1..20: mol_type = other DNA
gtggctcacgcctgtaatct

SEQ ID NO: 278305 - DNA, 20 bp, synthetic construct
  source 1..20: mol_type = other DNA
ggtggctcacgcctgtaatc

SEQ ID NO: 278306 - DNA, 20 bp, synthetic construct
  source 1..20: mol_type = other DNA
cggtggctcacgcctgtaat

SEQ ID NO: 278307 - DNA, 20 bp, synthetic construct
  source 1..20: mol_type = other DNA
acggtggctcacgcctgtaa

SEQ ID NO: 278308 - DNA, 20 bp, synthetic construct
  source 1..20: mol_type = other DNA
cacggtggctcacgcctgta

SEQ ID NO: 278309 - DNA, 20 bp, synthetic construct
  source 1..20: mol_type = other DNA
gcacggtggctcacgcctgt

SEQ ID NO: 278310 - DNA, 20 bp, synthetic construct
  source 1..20: mol_type = other DNA
ggcacggtggctcacgcctg

SEQ ID NO: 278311 - DNA, 20 bp, synthetic construct
  source 1..20: mol_type = other DNA
gggcacggtggctcacgcct

SEQ ID NO: 278312 - DNA, 20 bp, synthetic construct
  source 1..20: mol_type = other DNA
cgggcacggtggctcacgcc

SEQ ID NO: 278313 - DNA, 20 bp, synthetic construct
  source 1..20: mol_type = other DNA
ccgggcacggtggctcacgc

SEQ ID NO: 278314 - DNA, 20 bp, synthetic construct
  source 1..20: mol_type = other DNA
gccgggcacggtggctcacg

SEQ ID NO: 278315 - DNA, 20 bp, synthetic construct
  source 1..20: mol_type = other DNA
ggccgggcacggtggctcac

SEQ ID NO: 278316 - DNA, 20 bp, synthetic construct
  source 1..20: mol_type = other DNA
tggccgggcacggtggctca

SEQ ID NO: 278317 - DNA, 20 bp, synthetic construct
  source 1..20: mol_type = other DNA
ctggccgggcacggtggctc

SEQ ID NO: 278318 - DNA, 20 bp, synthetic construct
  source 1..20: mol_type = other DNA
tctggccgggcacggtggct

SEQ ID NO: 278319 - DNA, 20 bp, synthetic construct
  source 1..20: mol_type = other DNA
ttctggccgggcacggtggc

SEQ ID NO: 278320 - DNA, 20 bp, synthetic construct
  source 1..20: mol_type = other DNA
tttctggccgggcacggtgg

SEQ ID NO: 278321 - DNA, 20 bp, synthetic construct
  source 1..20: mol_type = other DNA
ttttctggccgggcacggtg

SEQ ID NO: 278322 - DNA, 20 bp, synthetic construct
  source 1..20: mol_type = other DNA
tttttctggccgggcacggt

SEQ ID NO: 278323 - DNA, 20 bp, synthetic construct
  source 1..20: mol_type = other DNA
ttttttctggccgggcacgg

SEQ ID NO: 278324 - DNA, 20 bp, synthetic construct
  source 1..20: mol_type = other DNA
tttttttctggccgggcacg

SEQ ID NO: 278325 - DNA, 20 bp, synthetic construct
  source 1..20: mol_type = other DNA
gtttttttctggccgggcac

SEQ ID NO: 278326 - DNA, 20 bp, synthetic construct
  source 1..20: mol_type = other DNA
tgtttttttctggccgggca

SEQ ID NO: 278327 - DNA, 20 bp, synthetic construct
  source 1..20: mol_type = other DNA
atgtttttttctggccgggc

SEQ ID NO: 278328 - DNA, 20 bp, synthetic construct
  source 1..20: mol_type = other DNA
aatgtttttttctggccggg

SEQ ID NO: 278329 - DNA, 20 bp, synthetic construct
  source 1..20: mol_type = other DNA
aaatgtttttttctggccgg

SEQ ID NO: 278330 - DNA, 20 bp, synthetic construct
  source 1..20: mol_type = other DNA
gaaatgtttttttctggccg

SEQ ID NO: 278331 - DNA, 20 bp, synthetic construct
  source 1..20: mol_type = other DNA
agaaatgtttttttctggcc

SEQ ID NO: 278332 - DNA, 20 bp, synthetic construct
  source 1..20: mol_type = other DNA
tagaaatgtttttttctggc

SEQ ID NO: 278333 - DNA, 20 bp, synthetic construct
  source 1..20: mol_type = other DNA
ttagaaatgtttttttctgg

SEQ ID NO: 278334 - DNA, 20 bp, synthetic construct
  source 1..20: mol_type = other DNA
cttagaaatgtttttttctg

SEQ ID NO: 278335 - DNA, 20 bp, synthetic construct
  source 1..20: mol_type = other DNA
acttagaaatgtttttttct

SEQ ID NO: 278336 - DNA, 20 bp, synthetic construct
  source 1..20: mol_type = other DNA
tacttagaaatgtttttttc

SEQ ID NO: 278337 - DNA, 20 bp, synthetic construct
  source 1..20: mol_type = other DNA
atacttagaaatgttttttt

SEQ ID NO: 278338 - DNA, 20 bp, synthetic construct
  source 1..20: mol_type = other DNA
catacttagaaatgtttttt

SEQ ID NO: 278339 - DNA, 20 bp, synthetic construct
  source 1..20: mol_type = other DNA
acatacttagaaatgttttt

SEQ ID NO: 278340 - DNA, 20 bp, synthetic construct
  source 1..20: mol_type = other DNA
cacatacttagaaatgtttt

SEQ ID NO: 278341 - DNA, 20 bp, synthetic construct
  source 1..20: mol_type = other DNA
ccacatacttagaaatgttt

SEQ ID NO: 278342 - DNA, 20 bp, synthetic construct
  source 1..20: mol_type = other DNA
gccacatacttagaaatgtt

SEQ ID NO: 278343 - DNA, 20 bp, synthetic construct
  source 1..20: mol_type = other DNA
tgccacatacttagaaatgt

SEQ ID NO: 278344 - DNA, 20 bp, synthetic construct
  source 1..20: mol_type = other DNA
ctgccacatacttagaaatg

SEQ ID NO: 278345 - DNA, 20 bp, synthetic construct
  source 1..20: mol_type = other DNA
tctgccacatacttagaaat

SEQ ID NO: 278346 - DNA, 20 bp, synthetic construct
  source 1..20: mol_type = other DNA
atctgccacatacttagaaa

SEQ ID NO: 278347 - DNA, 20 bp, synthetic construct
  source 1..20: mol_type = other DNA
tatctgccacatacttagaa

SEQ ID NO: 278348 - DNA, 20 bp, synthetic construct
  source 1..20: mol_type = other DNA
gtatctgccacatacttaga

SEQ ID NO: 278349 - DNA, 20 bp, synthetic construct
  source 1..20: mol_type = other DNA
agtatctgccacatacttag

SEQ ID NO: 278350 - DNA, 20 bp, synthetic construct
  source 1..20: mol_type = other DNA
cagtatctgccacatactta

SEQ ID NO: 278351 - DNA, 20 bp, synthetic construct
  source 1..20: mol_type = other DNA
tcagtatctgccacatactt

SEQ ID NO: 278352 - DNA, 20 bp, synthetic construct
  source 1..20: mol_type = other DNA
ttcagtatctgccacatact

SEQ ID NO: 278353 - DNA, 20 bp, synthetic construct
  source 1..20: mol_type = other DNA
attcagtatctgccacatac

SEQ ID NO: 278354 - DNA, 20 bp, synthetic construct
  source 1..20: mol_type = other DNA
aattcagtatctgccacata

SEQ ID NO: 278355 - DNA, 20 bp, synthetic construct
  source 1..20: mol_type = other DNA
taattcagtatctgccacat

SEQ ID NO: 278356 - DNA, 20 bp, synthetic construct
  source 1..20: mol_type = other DNA
ataattcagtatctgccaca

SEQ ID NO: 278357 - DNA, 20 bp, synthetic construct
  source 1..20: mol_type = other DNA
aataattcagtatctgccac

SEQ ID NO: 278358 - DNA, 20 bp, synthetic construct
  source 1..20: mol_type = other DNA
caataattcagtatctgcca

SEQ ID NO: 278359 - DNA, 20 bp, synthetic construct
  source 1..20: mol_type = other DNA
gcaataattcagtatctgcc

SEQ ID NO: 278360 - DNA, 20 bp, synthetic construct
  source 1..20: mol_type = other DNA
agcaataattcagtatctgc

SEQ ID NO: 278361 - DNA, 20 bp, synthetic construct
  source 1..20: mol_type = other DNA
aagcaataattcagtatctg

SEQ ID NO: 278362 - DNA, 20 bp, synthetic construct
  source 1..20: mol_type = other DNA
taagcaataattcagtatct

SEQ ID NO: 278363 - DNA, 20 bp, synthetic construct
  source 1..20: mol_type = other DNA
ttaagcaataattcagtatc

SEQ ID NO: 278364 - DNA, 20 bp, synthetic construct
  source 1..20: mol_type = other DNA
attaagcaataattcagtat

SEQ ID NO: 278365 - DNA, 20 bp, synthetic construct
  source 1..20: mol_type = other DNA
cattaagcaataattcagta

SEQ ID NO: 278366 - DNA, 20 bp, synthetic construct
  source 1..20: mol_type = other DNA
acattaagcaataattcagt

SEQ ID NO: 278367 - DNA, 20 bp, synthetic construct
  source 1..20: mol_type = other DNA
gacattaagcaataattcag

SEQ ID NO: 278368 - DNA, 20 bp, synthetic construct
  source 1..20: mol_type = other DNA
ggacattaagcaataattca

SEQ ID NO: 278369 - DNA, 20 bp, synthetic construct
  source 1..20: mol_type = other DNA
aggacattaagcaataattc

SEQ ID NO: 278370 - DNA, 20 bp, synthetic construct
  source 1..20: mol_type = other DNA
aaggacattaagcaataatt

SEQ ID NO: 278371 - DNA, 20 bp, synthetic construct
  source 1..20: mol_type = other DNA
aaaggacattaagcaataat

SEQ ID NO: 278372 - DNA, 20 bp, synthetic construct
  source 1..20: mol_type = other DNA
caaaggacattaagcaataa

SEQ ID NO: 278373 - DNA, 20 bp, synthetic construct
  source 1..20: mol_type = other DNA
tcaaaggacattaagcaata

SEQ ID NO: 278374 - DNA, 20 bp, synthetic construct
  source 1..20: mol_type = other DNA
atcaaaggacattaagcaat

SEQ ID NO: 278375 - DNA, 20 bp, synthetic construct
  source 1..20: mol_type = other DNA
aatcaaaggacattaagcaa

SEQ ID NO: 278376 - DNA, 20 bp, synthetic construct
  source 1..20: mol_type = other DNA
gaatcaaaggacattaagca

SEQ ID NO: 278377 - DNA, 20 bp, synthetic construct
  source 1..20: mol_type = other DNA
tgaatcaaaggacattaagc

SEQ ID NO: 278378 - DNA, 20 bp, synthetic construct
  source 1..20: mol_type = other DNA
atgaatcaaaggacattaag

SEQ ID NO: 278379 - DNA, 20 bp, synthetic construct
  source 1..20: mol_type = other DNA
aatgaatcaaaggacattaa

SEQ ID NO: 278380 - DNA, 20 bp, synthetic construct
  source 1..20: mol_type = other DNA
aaatgaatcaaaggacatta

SEQ ID NO: 278381 - DNA, 20 bp, synthetic construct
  source 1..20: mol_type = other DNA
caaatgaatcaaaggacatt

SEQ ID NO: 278382 - DNA, 20 bp, synthetic construct
  source 1..20: mol_type = other DNA
acaaatgaatcaaaggacat

SEQ ID NO: 278383 - DNA, 20 bp, synthetic construct
  source 1..20: mol_type = other DNA
aacaaatgaatcaaaggaca

SEQ ID NO: 278384 - DNA, 20 bp, synthetic construct
  source 1..20: mol_type = other DNA
aaacaaatgaatcaaaggac

SEQ ID NO: 278385 - DNA, 20 bp, synthetic construct
  source 1..20: mol_type = other DNA
taaacaaatgaatcaaagga

SEQ ID NO: 278386 - DNA, 20 bp, synthetic construct
  source 1..20: mol_type = other DNA
ttaaacaaatgaatcaaagg

SEQ ID NO: 278387 - DNA, 20 bp, synthetic construct
  source 1..20: mol_type = other DNA
attaaacaaatgaatcaaag

SEQ ID NO: 278388 - DNA, 20 bp, synthetic construct
  source 1..20: mol_type = other DNA
aattaaacaaatgaatcaaa

SEQ ID NO: 278389 - DNA, 20 bp, synthetic construct
  source 1..20: mol_type = other DNA
aaattaaacaaatgaatcaa

SEQ ID NO: 278390 - DNA, 20 bp, synthetic construct
  source 1..20: mol_type = other DNA
gaaattaaacaaatgaatca

SEQ ID NO: 278391 - DNA, 20 bp, synthetic construct
  source 1..20: mol_type = other DNA
agaaattaaacaaatgaatc

SEQ ID NO: 278392 - DNA, 20 bp, synthetic construct
  source 1..20: mol_type = other DNA
aagaaattaaacaaatgaat

SEQ ID NO: 278393 - DNA, 20 bp, synthetic construct
  source 1..20: mol_type = other DNA
aaagaaattaaacaaatgaa

SEQ ID NO: 278394 - DNA, 20 bp, synthetic construct
  source 1..20: mol_type = other DNA
taaagaaattaaacaaatga

SEQ ID NO: 278395 - DNA, 20 bp, synthetic construct
  source 1..20: mol_type = other DNA
ttaaagaaattaaacaaatg

SEQ ID NO: 278396 - DNA, 20 bp, synthetic construct
  source 1..20: mol_type = other DNA
attaaagaaattaaacaaat

SEQ ID NO: 278397 - DNA, 20 bp, synthetic construct
  source 1..20: mol_type = other DNA
cattaaagaaattaaacaaa

SEQ ID NO: 278398 - DNA, 20 bp, synthetic construct
  source 1..20: mol_type = other DNA
ccattaaagaaattaaacaa

SEQ ID NO: 278399 - DNA, 20 bp, synthetic construct
  source 1..20: mol_type = other DNA
tccattaaagaaattaaaca

SEQ ID NO: 278400 - DNA, 20 bp, synthetic construct
  source 1..20: mol_type = other DNA
atccattaaagaaattaaac

SEQ ID NO: 278401 - DNA, 20 bp, synthetic construct
  source 1..20: mol_type = other DNA
aatccattaaagaaattaaa

SEQ ID NO: 278402 - DNA, 20 bp, synthetic construct
  source 1..20: mol_type = other DNA
taatccattaaagaaattaa

SEQ ID NO: 278403 - DNA, 20 bp, synthetic construct
  source 1..20: mol_type = other DNA
ctaatccattaaagaaatta

SEQ ID NO: 278404 - DNA, 20 bp, synthetic construct
  source 1..20: mol_type = other DNA
actaatccattaaagaaatt

SEQ ID NO: 278405 - DNA, 20 bp, synthetic construct
  source 1..20: mol_type = other DNA
tactaatccattaaagaaat

SEQ ID NO: 278406 - DNA, 20 bp, synthetic construct
  source 1..20: mol_type = other DNA
gtactaatccattaaagaaa

SEQ ID NO: 278407 - DNA, 20 bp, synthetic construct
  source 1..20: mol_type = other DNA
tgtactaatccattaaagaa

SEQ ID NO: 278408 - DNA, 20 bp, synthetic construct
  source 1..20: mol_type = other DNA
ctgtactaatccattaaaga

SEQ ID NO: 278409 - DNA, 20 bp, synthetic construct
  source 1..20: mol_type = other DNA
tctgtactaatccattaaag

SEQ ID NO: 278410 - DNA, 20 bp, synthetic construct
  source 1..20: mol_type = other DNA
ttctgtactaatccattaaa

SEQ ID NO: 278411 - DNA, 20 bp, synthetic construct
  source 1..20: mol_type = other DNA
tttctgtactaatccattaa

SEQ ID NO: 278412 - DNA, 20 bp, synthetic construct
  source 1..20: mol_type = other DNA
ttttctgtactaatccatta

SEQ ID NO: 278413 - DNA, 20 bp, synthetic construct
  source 1..20: mol_type = other DNA
gttttctgtactaatccatt

SEQ ID NO: 278414 - DNA, 20 bp, synthetic construct
  source 1..20: mol_type = other DNA
tgttttctgtactaatccat

SEQ ID NO: 278415 - DNA, 20 bp, synthetic construct
  source 1..20: mol_type = other DNA
ttgttttctgtactaatcca

SEQ ID NO: 278416 - DNA, 20 bp, synthetic construct
  source 1..20: mol_type = other DNA
tttgttttctgtactaatcc

SEQ ID NO: 278417 - DNA, 20 bp, synthetic construct
  source 1..20: mol_type = other DNA
ctttgttttctgtactaatc

SEQ ID NO: 278418 - DNA, 20 bp, synthetic construct
  source 1..20: mol_type = other DNA
actttgttttctgtactaat

SEQ ID NO: 278419 - DNA, 20 bp, synthetic construct
  source 1..20: mol_type = other DNA
aactttgttttctgtactaa

SEQ ID NO: 278420 - DNA, 20 bp, synthetic construct
  source 1..20: mol_type = other DNA
gaactttgttttctgtacta

SEQ ID NO: 278421 - DNA, 20 bp, synthetic construct
  source 1..20: mol_type = other DNA
agaactttgttttctgtact

SEQ ID NO: 278422 - DNA, 20 bp, synthetic construct
  source 1..20: mol_type = other DNA
gagaactttgttttctgtac

SEQ ID NO: 278423 - DNA, 20 bp, synthetic construct
  source 1..20: mol_type = other DNA
agagaactttgttttctgta

SEQ ID NO: 278424 - DNA, 20 bp, synthetic construct
  source 1..20: mol_type = other DNA
aagagaactttgttttctgt

SEQ ID NO: 278425 - DNA, 20 bp, synthetic construct
  source 1..20: mol_type = other DNA
gaagagaactttgttttctg

SEQ ID NO: 278426 - DNA, 20 bp, synthetic construct
  source 1..20: mol_type = other DNA
ggaagagaactttgttttct

SEQ ID NO: 278427 - DNA, 20 bp, synthetic construct
  source 1..20: mol_type = other DNA
aggaagagaactttgttttc

SEQ ID NO: 278428 - DNA, 20 bp, synthetic construct
  source 1..20: mol_type = other DNA
aaggaagagaactttgtttt

SEQ ID NO: 278429 - DNA, 20 bp, synthetic construct
  source 1..20: mol_type = other DNA
caaggaagagaactttgttt

SEQ ID NO: 278430 - DNA, 20 bp, synthetic construct
  source 1..20: mol_type = other DNA
tcaaggaagagaactttgtt

SEQ ID NO: 278431 - DNA, 20 bp, synthetic construct
  source 1..20: mol_type = other DNA
ttcaaggaagagaactttgt

SEQ ID NO: 278432 - DNA, 20 bp, synthetic construct
  source 1..20: mol_type = other DNA
tttcaaggaagagaactttg

SEQ ID NO: 278433 - DNA, 20 bp, synthetic construct
  source 1..20: mol_type = other DNA
ttttcaaggaagagaacttt

SEQ ID NO: 278434 - DNA, 20 bp, synthetic construct
  source 1..20: mol_type = other DNA
tttttcaaggaagagaactt

SEQ ID NO: 278435 - DNA, 20 bp, synthetic construct
  source 1..20: mol_type = other DNA
gtttttcaaggaagagaact

SEQ ID NO: 278436 - DNA, 20 bp, synthetic construct
  source 1..20: mol_type = other DNA
agtttttcaaggaagagaac

SEQ ID NO: 278437 - DNA, 20 bp, synthetic construct
  source 1..20: mol_type = other DNA
cagtttttcaaggaagagaa

SEQ ID NO: 278438 - DNA, 20 bp, synthetic construct
  source 1..20: mol_type = other DNA
ccagtttttcaaggaagaga

SEQ ID NO: 278439 - DNA, 20 bp, synthetic construct
  source 1..20: mol_type = other DNA
accagtttttcaaggaagag

SEQ ID NO: 278440 - DNA, 20 bp, synthetic construct
  source 1..20: mol_type = other DNA
taccagtttttcaaggaaga

SEQ ID NO: 278441 - DNA, 20 bp, synthetic construct
  source 1..20: mol_type = other DNA
ttaccagtttttcaaggaag

SEQ ID NO: 278442 - DNA, 20 bp, synthetic construct
  source 1..20: mol_type = other DNA
cttaccagtttttcaaggaa

SEQ ID NO: 278443 - DNA, 20 bp, synthetic construct
  source 1..20: mol_type = other DNA
acttaccagtttttcaagga

SEQ ID NO: 278444 - DNA, 20 bp, synthetic construct
  source 1..20: mol_type = other DNA
aacttaccagtttttcaagg

SEQ ID NO: 278445 - DNA, 20 bp, synthetic construct
  source 1..20: mol_type = other DNA
aaacttaccagtttttcaag

SEQ ID NO: 278446 - DNA, 20 bp, synthetic construct
  source 1..20: mol_type = other DNA
aaaacttaccagtttttcaa

SEQ ID NO: 278447 - DNA, 20 bp, synthetic construct
  source 1..20: mol_type = other DNA
gaaaacttaccagtttttca

SEQ ID NO: 278448 - DNA, 20 bp, synthetic construct
  source 1..20: mol_type = other DNA
agaaaacttaccagtttttc

SEQ ID NO: 278449 - DNA, 20 bp, synthetic construct
  source 1..20: mol_type = other DNA
aagaaaacttaccagttttt

SEQ ID NO: 278450 - DNA, 20 bp, synthetic construct
  source 1..20: mol_type = other DNA
aaagaaaacttaccagtttt

SEQ ID NO: 278451 - DNA, 20 bp, synthetic construct
  source 1..20: mol_type = other DNA
caaagaaaacttaccagttt

SEQ ID NO: 278452 - DNA, 20 bp, synthetic construct
  source 1..20: mol_type = other DNA
acaaagaaaacttaccagtt

SEQ ID NO: 278453 - DNA, 20 bp, synthetic construct
  source 1..20: mol_type = other DNA
gacaaagaaaacttaccagt

SEQ ID NO: 278454 - DNA, 20 bp, synthetic construct
  source 1..20: mol_type = other DNA
tgacaaagaaaacttaccag

SEQ ID NO: 278455 - DNA, 20 bp, synthetic construct
  source 1..20: mol_type = other DNA
ctgacaaagaaaacttacca

SEQ ID NO: 278456 - DNA, 20 bp, synthetic construct
  source 1..20: mol_type = other DNA
tctgacaaagaaaacttacc

SEQ ID NO: 278457 - DNA, 20 bp, synthetic construct
  source 1..20: mol_type = other DNA
atctgacaaagaaaacttac

SEQ ID NO: 278458 - DNA, 20 bp, synthetic construct
  source 1..20: mol_type = other DNA
tatctgacaaagaaaactta

SEQ ID NO: 278459 - DNA, 20 bp, synthetic construct
  source 1..20: mol_type = other DNA
ttatctgacaaagaaaactt

SEQ ID NO: 278460 - DNA, 20 bp, synthetic construct
  source 1..20: mol_type = other DNA
cttatctgacaaagaaaact

SEQ ID NO: 278461 - DNA, 20 bp, synthetic construct
  source 1..20: mol_type = other DNA
ccttatctgacaaagaaaac

SEQ ID NO: 278462 - DNA, 20 bp, synthetic construct
  source 1..20: mol_type = other DNA
tccttatctgacaaagaaaa

SEQ ID NO: 278463 - DNA, 20 bp, synthetic construct
  source 1..20: mol_type = other DNA
ctccttatctgacaaagaaa

SEQ ID NO: 278464 - DNA, 20 bp, synthetic construct
  source 1..20: mol_type = other DNA
tctccttatctgacaaagaa

SEQ ID NO: 278465 - DNA, 20 bp, synthetic construct
  source 1..20: mol_type = other DNA
ctctccttatctgacaaaga

SEQ ID NO: 278466 - DNA, 20 bp, synthetic construct
  source 1..20: mol_type = other DNA
actctccttatctgacaaag

SEQ ID NO: 278467 - DNA, 20 bp, synthetic construct
  source 1..20: mol_type = other DNA
aactctccttatctgacaaa

SEQ ID NO: 278468 - DNA, 20 bp, synthetic construct
  source 1..20: mol_type = other DNA
taactctccttatctgacaa

SEQ ID NO: 278469 - DNA, 20 bp, synthetic construct
  source 1..20: mol_type = other DNA
ttaactctccttatctgaca

SEQ ID NO: 278470 - DNA, 20 bp, synthetic construct
  source 1..20: mol_type = other DNA
tttaactctccttatctgac

SEQ ID NO: 278471 - DNA, 20 bp, synthetic construct
  source 1..20: mol_type = other DNA
atttaactctccttatctga

SEQ ID NO: 278472 - DNA, 20 bp, synthetic construct
  source 1..20: mol_type = other DNA
tatttaactctccttatctg

SEQ ID NO: 278473 - DNA, 20 bp, synthetic construct
  source 1..20: mol_type = other DNA
ttatttaactctccttatct

SEQ ID NO: 278474 - DNA, 20 bp, synthetic construct
  source 1..20: mol_type = other DNA
gttatttaactctccttatc

SEQ ID NO: 278475 - DNA, 20 bp, synthetic construct
  source 1..20: mol_type = other DNA
ggttatttaactctccttat

SEQ ID NO: 278476 - DNA, 20 bp, synthetic construct
  source 1..20: mol_type = other DNA
gggttatttaactctcctta

SEQ ID NO: 278477 - DNA, 20 bp, synthetic construct
  source 1..20: mol_type = other DNA
tgggttatttaactctcctt

SEQ ID NO: 278478 - DNA, 20 bp, synthetic construct
  source 1..20: mol_type = other DNA
atgggttatttaactctcct

SEQ ID NO: 278479 - DNA, 20 bp, synthetic construct
  source 1..20: mol_type = other DNA
catgggttatttaactctcc

SEQ ID NO: 278480 - DNA, 20 bp, synthetic construct
  source 1..20: mol_type = other DNA
tcatgggttatttaactctc

SEQ ID NO: 278481 - DNA, 20 bp, synthetic construct
  source 1..20: mol_type = other DNA
gtcatgggttatttaactct

SEQ ID NO: 278482 - DNA, 20 bp, synthetic construct
  source 1..20: mol_type = other DNA
tgtcatgggttatttaactc

SEQ ID NO: 278483 - DNA, 20 bp, synthetic construct
  source 1..20: mol_type = other DNA
atgtcatgggttatttaact

SEQ ID NO: 278484 - DNA, 20 bp, synthetic construct
  source 1..20: mol_type = other DNA
aatgtcatgggttatttaac

SEQ ID NO: 278485 - DNA, 20 bp, synthetic construct
  source 1..20: mol_type = other DNA
aaatgtcatgggttatttaa

SEQ ID NO: 278486 - DNA, 20 bp, synthetic construct
  source 1..20: mol_type = other DNA
gaaatgtcatgggttattta

SEQ ID NO: 278487 - DNA, 20 bp, synthetic construct
  source 1..20: mol_type = other DNA
ggaaatgtcatgggttattt

SEQ ID NO: 278488 - DNA, 20 bp, synthetic construct
  source 1..20: mol_type = other DNA
gggaaatgtcatgggttatt

SEQ ID NO: 278489 - DNA, 20 bp, synthetic construct
  source 1..20: mol_type = other DNA
agggaaatgtcatgggttat

SEQ ID NO: 278490 - DNA, 20 bp, synthetic construct
  source 1..20: mol_type = other DNA
aagggaaatgtcatgggtta

SEQ ID NO: 278491 - DNA, 20 bp, synthetic construct
  source 1..20: mol_type = other DNA
aaagggaaatgtcatgggtt

SEQ ID NO: 278492 - DNA, 20 bp, synthetic construct
  source 1..20: mol_type = other DNA
aaaagggaaatgtcatgggt

SEQ ID NO: 278493 - DNA, 20 bp, synthetic construct
  source 1..20: mol_type = other DNA
aaaaagggaaatgtcatggg

SEQ ID NO: 278494 - DNA, 20 bp, synthetic construct
  source 1..20: mol_type = other DNA
caaaaagggaaatgtcatgg

SEQ ID NO: 278495 - DNA, 20 bp, synthetic construct
  source 1..20: mol_type = other DNA
gcaaaaagggaaatgtcatg

SEQ ID NO: 278496 - DNA, 20 bp, synthetic construct
  source 1..20: mol_type = other DNA
ggcaaaaagggaaatgtcat

SEQ ID NO: 278497 - DNA, 20 bp, synthetic construct
  source 1..20: mol_type = other DNA
aggcaaaaagggaaatgtca

SEQ ID NO: 278498 - DNA, 20 bp, synthetic construct
  source 1..20: mol_type = other DNA
gaggcaaaaagggaaatgtc

SEQ ID NO: 278499 - DNA, 20 bp, synthetic construct
  source 1..20: mol_type = other DNA
cgaggcaaaaagggaaatgt

SEQ ID NO: 278500 - DNA, 20 bp, synthetic construct
  source 1..20: mol_type = other DNA
ccgaggcaaaaagggaaatg

SEQ ID NO: 278501 - DNA, 20 bp, synthetic construct
  source 1..20: mol_type = other DNA
gccgaggcaaaaagggaaat

SEQ ID NO: 278502 - DNA, 20 bp, synthetic construct
  source 1..20: mol_type = other DNA
agccgaggcaaaaagggaaa

SEQ ID NO: 278503 - DNA, 20 bp, synthetic construct
  source 1..20: mol_type = other DNA
aagccgaggcaaaaagggaa

SEQ ID NO: 278504 - DNA, 20 bp, synthetic construct
  source 1..20: mol_type = other DNA
gaagccgaggcaaaaaggga

SEQ ID NO: 278505 - DNA, 20 bp, synthetic construct
  source 1..20: mol_type = other DNA
ggaagccgaggcaaaaaggg

SEQ ID NO: 278506 - DNA, 20 bp, synthetic construct
  source 1..20: mol_type = other DNA
tggaagccgaggcaaaaagg

SEQ ID NO: 278507 - DNA, 20 bp, synthetic construct
  source 1..20: mol_type = other DNA
ctggaagccgaggcaaaaag

SEQ ID NO: 278508 - DNA, 20 bp, synthetic construct
  source 1..20: mol_type = other DNA
cctggaagccgaggcaaaaa

SEQ ID NO: 278509 - DNA, 20 bp, synthetic construct
  source 1..20: mol_type = other DNA
tcctggaagccgaggcaaaa

SEQ ID NO: 278510 - DNA, 20 bp, synthetic construct
  source 1..20: mol_type = other DNA
ttcctggaagccgaggcaaa

SEQ ID NO: 278511 - DNA, 20 bp, synthetic construct
  source 1..20: mol_type = other DNA
cttcctggaagccgaggcaa

SEQ ID NO: 278512 - DNA, 20 bp, synthetic construct
  source 1..20: mol_type = other DNA
gcttcctggaagccgaggca

SEQ ID NO: 278513 - DNA, 20 bp, synthetic construct
  source 1..20: mol_type = other DNA
agcttcctggaagccgaggc

SEQ ID NO: 278514 - DNA, 20 bp, synthetic construct
  source 1..20: mol_type = other DNA
gagcttcctggaagccgagg

SEQ ID NO: 278515 - DNA, 20 bp, synthetic construct
  source 1..20: mol_type = other DNA
tgagcttcctggaagccgag

SEQ ID NO: 278516 - DNA, 20 bp, synthetic construct
  source 1..20: mol_type = other DNA
ttgagcttcctggaagccga

SEQ ID NO: 278517 - DNA, 20 bp, synthetic construct
  source 1..20: mol_type = other DNA
tttgagcttcctggaagccg

SEQ ID NO: 278518 - DNA, 20 bp, synthetic construct
  source 1..20: mol_type = other DNA
ctttgagcttcctggaagcc

SEQ ID NO: 278519 - DNA, 20 bp, synthetic construct
  source 1..20: mol_type = other DNA
actttgagcttcctggaagc

SEQ ID NO: 278520 - DNA, 20 bp, synthetic construct
  source 1..20: mol_type = other DNA
aactttgagcttcctggaag

SEQ ID NO: 278521 - DNA, 20 bp, synthetic construct
  source 1..20: mol_type = other DNA
taactttgagcttcctggaa

SEQ ID NO: 278522 - DNA, 20 bp, synthetic construct
  source 1..20: mol_type = other DNA
ttaactttgagcttcctgga

SEQ ID NO: 278523 - DNA, 20 bp, synthetic construct
  source 1..20: mol_type = other DNA
tttaactttgagcttcctgg

SEQ ID NO: 278524 - DNA, 20 bp, synthetic construct
  source 1..20: mol_type = other DNA
atttaactttgagcttcctg

SEQ ID NO: 278525 - DNA, 20 bp, synthetic construct
  source 1..20: mol_type = other DNA
catttaactttgagcttcct

SEQ ID NO: 278526 - DNA, 20 bp, synthetic construct
  source 1..20: mol_type = other DNA
acatttaactttgagcttcc

SEQ ID NO: 278527 - DNA, 20 bp, synthetic construct
  source 1..20: mol_type = other DNA
tacatttaactttgagcttc

SEQ ID NO: 278528 - DNA, 20 bp, synthetic construct
  source 1..20: mol_type = other DNA
ttacatttaactttgagctt

SEQ ID NO: 278529 - DNA, 20 bp, synthetic construct
  source 1..20: mol_type = other DNA
attacatttaactttgagct

SEQ ID NO: 278530 - DNA, 20 bp, synthetic construct
  source 1..20: mol_type = other DNA
cattacatttaactttgagc

SEQ ID NO: 278531 - DNA, 20 bp, synthetic construct
  source 1..20: mol_type = other DNA
tcattacatttaactttgag

SEQ ID NO: 278532 - DNA, 20 bp, synthetic construct
  source 1..20: mol_type = other DNA
atcattacatttaactttga

SEQ ID NO: 278533 - DNA, 20 bp, synthetic construct
  source 1..20: mol_type = other DNA
gatcattacatttaactttg

SEQ ID NO: 278534 - DNA, 20 bp, synthetic construct
  source 1..20: mol_type = other DNA
tgatcattacatttaacttt

SEQ ID NO: 278535 - DNA, 20 bp, synthetic construct
  source 1..20: mol_type = other DNA
gtgatcattacatttaactt

SEQ ID NO: 278536 - DNA, 20 bp, synthetic construct
  source 1..20: mol_type = other DNA
agtgatcattacatttaact

SEQ ID NO: 278537 - DNA, 20 bp, synthetic construct
  source 1..20: mol_type = other DNA
gagtgatcattacatttaac

SEQ ID NO: 278538 - DNA, 20 bp, synthetic construct
  source 1..20: mol_type = other DNA
agagtgatcattacatttaa

SEQ ID NO: 278539 - DNA, 20 bp, synthetic construct
  source 1..20: mol_type = other DNA
aagagtgatcattacattta

SEQ ID NO: 278540 - DNA, 20 bp, synthetic construct
  source 1..20: mol_type = other DNA
caagagtgatcattacattt

SEQ ID NO: 278541 - DNA, 20 bp, synthetic construct
  source 1..20: mol_type = other DNA
acaagagtgatcattacatt

SEQ ID NO: 278542 - DNA, 20 bp, synthetic construct
  source 1..20: mol_type = other DNA
tacaagagtgatcattacat

SEQ ID NO: 278543 - DNA, 20 bp, synthetic construct
  source 1..20: mol_type = other DNA
ttacaagagtgatcattaca

SEQ ID NO: 278544 - DNA, 20 bp, synthetic construct
  source 1..20: mol_type = other DNA
attacaagagtgatcattac

SEQ ID NO: 278545 - DNA, 20 bp, synthetic construct
  source 1..20: mol_type = other DNA
aattacaagagtgatcatta

SEQ ID NO: 278546 - DNA, 20 bp, synthetic construct
  source 1..20: mol_type = other DNA
taattacaagagtgatcatt

SEQ ID NO: 278547 - DNA, 20 bp, synthetic construct
  source 1..20: mol_type = other DNA
ataattacaagagtgatcat

SEQ ID NO: 278548 - DNA, 20 bp, synthetic construct
  source 1..20: mol_type = other DNA
gataattacaagagtgatca

SEQ ID NO: 278549 - DNA, 20 bp, synthetic construct
  source 1..20: mol_type = other DNA
tgataattacaagagtgatc

SEQ ID NO: 278550 - DNA, 20 bp, synthetic construct
  source 1..20: mol_type = other DNA
ctgataattacaagagtgat

SEQ ID NO: 278551 - DNA, 20 bp, synthetic construct
  source 1..20: mol_type = other DNA
actgataattacaagagtga

SEQ ID NO: 278552 - DNA, 20 bp, synthetic construct
  source 1..20: mol_type = other DNA
cactgataattacaagagtg

SEQ ID NO: 278553 - DNA, 20 bp, synthetic construct
  source 1..20: mol_type = other DNA
acactgataattacaagagt

SEQ ID NO: 278554 - DNA, 20 bp, synthetic construct
  source 1..20: mol_type = other DNA
aacactgataattacaagag

SEQ ID NO: 278555 - DNA, 20 bp, synthetic construct
  source 1..20: mol_type = other DNA
caacactgataattacaaga

SEQ ID NO: 278556 - DNA, 20 bp, synthetic construct
  source 1..20: mol_type = other DNA
tcaacactgataattacaag

SEQ ID NO: 278557 - DNA, 20 bp, synthetic construct
  source 1..20: mol_type = other DNA
atcaacactgataattacaa

SEQ ID NO: 278558 - DNA, 20 bp, synthetic construct
  source 1..20: mol_type = other DNA
catcaacactgataattaca

SEQ ID NO: 278559 - DNA, 20 bp, synthetic construct
  source 1..20: mol_type = other DNA
gcatcaacactgataattac

SEQ ID NO: 278560 - DNA, 20 bp, synthetic construct
  source 1..20: mol_type = other DNA
ggcatcaacactgataatta

SEQ ID NO: 278561 - DNA, 20 bp, synthetic construct
  source 1..20: mol_type = other DNA
gggcatcaacactgataatt

SEQ ID NO: 278562 - DNA, 20 bp, synthetic construct
  source 1..20: mol_type = other DNA
agggcatcaacactgataat

SEQ ID NO: 278563 - DNA, 20 bp, synthetic construct
  source 1..20: mol_type = other DNA
aagggcatcaacactgataa

SEQ ID NO: 278564 - DNA, 20 bp, synthetic construct
  source 1..20: mol_type = other DNA
gaagggcatcaacactgata

SEQ ID NO: 278565 - DNA, 20 bp, synthetic construct
  source 1..20: mol_type = other DNA
ggaagggcatcaacactgat

SEQ ID NO: 278566 - DNA, 20 bp, synthetic construct
  source 1..20: mol_type = other DNA
gggaagggcatcaacactga

SEQ ID NO: 278567 - DNA, 20 bp, synthetic construct
  source 1..20: mol_type = other DNA
agggaagggcatcaacactg

SEQ ID NO: 278568 - DNA, 20 bp, synthetic construct
  source 1..20: mol_type = other DNA
aagggaagggcatcaacact

SEQ ID NO: 278569 - DNA, 20 bp, synthetic construct
  source 1..20: mol_type = other DNA
gaagggaagggcatcaacac

SEQ ID NO: 278570 - DNA, 20 bp, synthetic construct
  source 1..20: mol_type = other DNA
agaagggaagggcatcaaca

SEQ ID NO: 278571 - DNA, 20 bp, synthetic construct
  source 1..20: mol_type = other DNA
aagaagggaagggcatcaac

SEQ ID NO: 278572 - DNA, 20 bp, synthetic construct
  source 1..20: mol_type = other DNA
gaagaagggaagggcatcaa

SEQ ID NO: 278573 - DNA, 20 bp, synthetic construct
  source 1..20: mol_type = other DNA
agaagaagggaagggcatca

SEQ ID NO: 278574 - DNA, 20 bp, synthetic construct
  source 1..20: mol_type = other DNA
tagaagaagggaagggcatc

SEQ ID NO: 278575 - DNA, 20 bp, synthetic construct
  source 1..20: mol_type = other DNA
ttagaagaagggaagggcat

SEQ ID NO: 278576 - DNA, 20 bp, synthetic construct
  source 1..20: mol_type = other DNA
attagaagaagggaagggca

SEQ ID NO: 278577 - DNA, 20 bp, synthetic construct
  source 1..20: mol_type = other DNA
cattagaagaagggaagggc

SEQ ID NO: 278578 - DNA, 20 bp, synthetic construct
  source 1..20: mol_type = other DNA
acattagaagaagggaaggg

SEQ ID NO: 278579 - DNA, 20 bp, synthetic construct
  source 1..20: mol_type = other DNA
aacattagaagaagggaagg

SEQ ID NO: 278580 - DNA, 20 bp, synthetic construct
  source 1..20: mol_type = other DNA
taacattagaagaagggaag

SEQ ID NO: 278581 - DNA, 20 bp, synthetic construct
  source 1..20: mol_type = other DNA
gtaacattagaagaagggaa

SEQ ID NO: 278582 - DNA, 20 bp, synthetic construct
  source 1..20: mol_type = other DNA
agtaacattagaagaaggga

SEQ ID NO: 278583 - DNA, 20 bp, synthetic construct
  source 1..20: mol_type = other DNA
gagtaacattagaagaaggg

SEQ ID NO: 278584 - DNA, 20 bp, synthetic construct
  source 1..20: mol_type = other DNA
agagtaacattagaagaagg

SEQ ID NO: 278585 - DNA, 20 bp, synthetic construct
  source 1..20: mol_type = other DNA
aagagtaacattagaagaag

SEQ ID NO: 278586 - DNA, 20 bp, synthetic construct
  source 1..20: mol_type = other DNA
aaagagtaacattagaagaa

SEQ ID NO: 278587 - DNA, 20 bp, synthetic construct
  source 1..20: mol_type = other DNA
taaagagtaacattagaaga

SEQ ID NO: 278588 - DNA, 20 bp, synthetic construct
  source 1..20: mol_type = other DNA
gtaaagagtaacattagaag

SEQ ID NO: 278589 - DNA, 20 bp, synthetic construct
  source 1..20: mol_type = other DNA
tgtaaagagtaacattagaa

SEQ ID NO: 278590 - DNA, 20 bp, synthetic construct
  source 1..20: mol_type = other DNA
atgtaaagagtaacattaga

SEQ ID NO: 278591 - DNA, 20 bp, synthetic construct
  source 1..20: mol_type = other DNA
aatgtaaagagtaacattag

SEQ ID NO: 278592 - DNA, 20 bp, synthetic construct
  source 1..20: mol_type = other DNA
aaatgtaaagagtaacatta

SEQ ID NO: 278593 - DNA, 20 bp, synthetic construct
  source 1..20: mol_type = other DNA
aaaatgtaaagagtaacatt

SEQ ID NO: 278594 - DNA, 20 bp, synthetic construct
  source 1..20: mol_type = other DNA
gaaaatgtaaagagtaacat

SEQ ID NO: 278595 - DNA, 20 bp, synthetic construct
  source 1..20: mol_type = other DNA
ggaaaatgtaaagagtaaca

SEQ ID NO: 278596 - DNA, 20 bp, synthetic construct
  source 1..20: mol_type = other DNA
aggaaaatgtaaagagtaac

SEQ ID NO: 278597 - DNA, 20 bp, synthetic construct
  source 1..20: mol_type = other DNA
caggaaaatgtaaagagtaa

SEQ ID NO: 278598 - DNA, 20 bp, synthetic construct
  source 1..20: mol_type = other DNA
gcaggaaaatgtaaagagta

SEQ ID NO: 278599 - DNA, 20 bp, synthetic construct
  source 1..20: mol_type = other DNA
agcaggaaaatgtaaagagt

SEQ ID NO: 278600 - DNA, 20 bp, synthetic construct
  source 1..20: mol_type = other DNA
aagcaggaaaatgtaaagag

SEQ ID NO: 278601 - DNA, 20 bp, synthetic construct
  source 1..20: mol_type = other DNA
aaagcaggaaaatgtaaaga

SEQ ID NO: 278602 - DNA, 20 bp, synthetic construct
  source 1..20: mol_type = other DNA
taaagcaggaaaatgtaaag

SEQ ID NO: 278603 - DNA, 20 bp, synthetic construct
  source 1..20: mol_type = other DNA
ataaagcaggaaaatgtaaa

SEQ ID NO: 278604 - DNA, 20 bp, synthetic construct
  source 1..20: mol_type = other DNA
aataaagcaggaaaatgtaa

SEQ ID NO: 278605 - DNA, 20 bp, synthetic construct
  source 1..20: mol_type = other DNA
taataaagcaggaaaatgta

SEQ ID NO: 278606 - DNA, 20 bp, synthetic construct
  source 1..20: mol_type = other DNA
ataataaagcaggaaaatgt

SEQ ID NO: 278607 - DNA, 20 bp, synthetic construct
  source 1..20: mol_type = other DNA
aataataaagcaggaaaatg

SEQ ID NO: 278608 - DNA, 20 bp, synthetic construct
  source 1..20: mol_type = other DNA
caataataaagcaggaaaat

SEQ ID NO: 278609 - DNA, 20 bp, synthetic construct
  source 1..20: mol_type = other DNA
acaataataaagcaggaaaa

SEQ ID NO: 278610 - DNA, 20 bp, synthetic construct
  source 1..20: mol_type = other DNA
cacaataataaagcaggaaa

SEQ ID NO: 278611 - DNA, 20 bp, synthetic construct
  source 1..20: mol_type = other DNA
acacaataataaagcaggaa

SEQ ID NO: 278612 - DNA, 20 bp, synthetic construct
  source 1..20: mol_type = other DNA
cacacaataataaagcagga

SEQ ID NO: 278613 - DNA, 20 bp, synthetic construct
  source 1..20: mol_type = other DNA
acacacaataataaagcagg

SEQ ID NO: 278614 - DNA, 20 bp, synthetic construct
  source 1..20: mol_type = other DNA
cacacacaataataaagcag

SEQ ID NO: 278615 - DNA, 20 bp, synthetic construct
  source 1..20: mol_type = other DNA
acacacacaataataaagca

SEQ ID NO: 278616 - DNA, 20 bp, synthetic construct
  source 1..20: mol_type = other DNA
aacacacacaataataaagc

SEQ ID NO: 278617 - DNA, 20 bp, synthetic construct
  source 1..20: mol_type = other DNA
aaacacacacaataataaag

SEQ ID NO: 278618 - DNA, 20 bp, synthetic construct
  source 1..20: mol_type = other DNA
aaaacacacacaataataaa

SEQ ID NO: 278619 - DNA, 20 bp, synthetic construct
  source 1..20: mol_type = other DNA
gaaaacacacacaataataa

SEQ ID NO: 278620 - DNA, 20 bp, synthetic construct
  source 1..20: mol_type = other DNA
agaaaacacacacaataata

SEQ ID NO: 278621 - DNA, 20 bp, synthetic construct
  source 1..20: mol_type = other DNA
tagaaaacacacacaataat

SEQ ID NO: 278622 - DNA, 20 bp, synthetic construct
  source 1..20: mol_type = other DNA
ttagaaaacacacacaataa

SEQ ID NO: 278623 - DNA, 20 bp, synthetic construct
  source 1..20: mol_type = other DNA
attagaaaacacacacaata

SEQ ID NO: 278624 - DNA, 20 bp, synthetic construct
  source 1..20: mol_type = other DNA
aattagaaaacacacacaat

SEQ ID NO: 278625 - DNA, 20 bp, synthetic construct
  source 1..20: mol_type = other DNA
gaattagaaaacacacacaa

SEQ ID NO: 278626 - DNA, 20 bp, synthetic construct
  source 1..20: mol_type = other DNA
agaattagaaaacacacaca

SEQ ID NO: 278627 - DNA, 20 bp, synthetic construct
  source 1..20: mol_type = other DNA
tagaattagaaaacacacac

SEQ ID NO: 278628 - DNA, 20 bp, synthetic construct
  source 1..20: mol_type = other DNA
ttagaattagaaaacacaca

SEQ ID NO: 278629 - DNA, 20 bp, synthetic construct
  source 1..20: mol_type = other DNA
cttagaattagaaaacacac

SEQ ID NO: 278630 - DNA, 20 bp, synthetic construct
  source 1..20: mol_type = other DNA
gcttagaattagaaaacaca

SEQ ID NO: 278631 - DNA, 20 bp, synthetic construct
  source 1..20: mol_type = other DNA
agcttagaattagaaaacac

SEQ ID NO: 278632 - DNA, 20 bp, synthetic construct
  source 1..20: mol_type = other DNA
cagcttagaattagaaaaca

SEQ ID NO: 278633 - DNA, 20 bp, synthetic construct
  source 1..20: mol_type = other DNA
acagcttagaattagaaaac

SEQ ID NO: 278634 - DNA, 20 bp, synthetic construct
  source 1..20: mol_type = other DNA
aacagcttagaattagaaaa

SEQ ID NO: 278635 - DNA, 20 bp, synthetic construct
  source 1..20: mol_type = other DNA
gaacagcttagaattagaaa

SEQ ID NO: 278636 - DNA, 20 bp, synthetic construct
  source 1..20: mol_type = other DNA
ggaacagcttagaattagaa

SEQ ID NO: 278637 - DNA, 20 bp, synthetic construct
  source 1..20: mol_type = other DNA
gggaacagcttagaattaga

SEQ ID NO: 278638 - DNA, 20 bp, synthetic construct
  source 1..20: mol_type = other DNA
tgggaacagcttagaattag

SEQ ID NO: 278639 - DNA, 20 bp, synthetic construct
  source 1..20: mol_type = other DNA
gtgggaacagcttagaatta

SEQ ID NO: 278640 - DNA, 20 bp, synthetic construct
  source 1..20: mol_type = other DNA
agtgggaacagcttagaatt

SEQ ID NO: 278641 - DNA, 20 bp, synthetic construct
  source 1..20: mol_type = other DNA
gagtgggaacagcttagaat

SEQ ID NO: 278642 - DNA, 20 bp, synthetic construct
  source 1..20: mol_type = other DNA
ggagtgggaacagcttagaa

SEQ ID NO: 278643 - DNA, 20 bp, synthetic construct
  source 1..20: mol_type = other DNA
aggagtgggaacagcttaga

SEQ ID NO: 278644 - DNA, 20 bp, synthetic construct
  source 1..20: mol_type = other DNA
aaggagtgggaacagcttag

SEQ ID NO: 278645 - DNA, 20 bp, synthetic construct
  source 1..20: mol_type = other DNA
aaaggagtgggaacagctta

SEQ ID NO: 278646 - DNA, 20 bp, synthetic construct
  source 1..20: mol_type = other DNA
gaaaggagtgggaacagctt

SEQ ID NO: 278647 - DNA, 20 bp, synthetic construct
  source 1..20: mol_type = other DNA
agaaaggagtgggaacagct

SEQ ID NO: 278648 - DNA, 20 bp, synthetic construct
  source 1..20: mol_type = other DNA
cagaaaggagtgggaacagc

SEQ ID NO: 278649 - DNA, 20 bp, synthetic construct
  source 1..20: mol_type = other DNA
tcagaaaggagtgggaacag

SEQ ID NO: 278650 - DNA, 20 bp, synthetic construct
  source 1..20: mol_type = other DNA
ttcagaaaggagtgggaaca

SEQ ID NO: 278651 - DNA, 20 bp, synthetic construct
  source 1..20: mol_type = other DNA
tttcagaaaggagtgggaac

SEQ ID NO: 278652 - DNA, 20 bp, synthetic construct
  source 1..20: mol_type = other DNA
ctttcagaaaggagtgggaa

SEQ ID NO: 278653 - DNA, 20 bp, synthetic construct
  source 1..20: mol_type = other DNA
gctttcagaaaggagtggga

SEQ ID NO: 278654 - DNA, 20 bp, synthetic construct
  source 1..20: mol_type = other DNA
tgctttcagaaaggagtggg

SEQ ID NO: 278655 - DNA, 20 bp, synthetic construct
  source 1..20: mol_type = other DNA
ctgctttcagaaaggagtgg

SEQ ID NO: 278656 - DNA, 20 bp, synthetic construct
  source 1..20: mol_type = other DNA
cctgctttcagaaaggagtg

SEQ ID NO: 278657 - DNA, 20 bp, synthetic construct
  source 1..20: mol_type = other DNA
gcctgctttcagaaaggagt

SEQ ID NO: 278658 - DNA, 20 bp, synthetic construct
  source 1..20: mol_type = other DNA
tgcctgctttcagaaaggag

SEQ ID NO: 278659 - DNA, 20 bp, synthetic construct
  source 1..20: mol_type = other DNA
ttgcctgctttcagaaagga

SEQ ID NO: 278660 - DNA, 20 bp, synthetic construct
  source 1..20: mol_type = other DNA
tttgcctgctttcagaaagg

SEQ ID NO: 278661 - DNA, 20 bp, synthetic construct
  source 1..20: mol_type = other DNA
atttgcctgctttcagaaag

SEQ ID NO: 278662 - DNA, 20 bp, synthetic construct
  source 1..20: mol_type = other DNA
gatttgcctgctttcagaaa

SEQ ID NO: 278663 - DNA, 20 bp, synthetic construct
  source 1..20: mol_type = other DNA
agatttgcctgctttcagaa

SEQ ID NO: 278664 - DNA, 20 bp, synthetic construct
  source 1..20: mol_type = other DNA
aagatttgcctgctttcaga

SEQ ID NO: 278665 - DNA, 20 bp, synthetic construct
  source 1..20: mol_type = other DNA
gaagatttgcctgctttcag

SEQ ID NO: 278666 - DNA, 20 bp, synthetic construct
  source 1..20: mol_type = other DNA
agaagatttgcctgctttca

SEQ ID NO: 278667 - DNA, 20 bp, synthetic construct
  source 1..20: mol_type = other DNA
tagaagatttgcctgctttc

SEQ ID NO: 278668 - DNA, 20 bp, synthetic construct
  source 1..20: mol_type = other DNA
ttagaagatttgcctgcttt

SEQ ID NO: 278669 - DNA, 20 bp, synthetic construct
  source 1..20: mol_type = other DNA
cttagaagatttgcctgctt

SEQ ID NO: 278670 - DNA, 20 bp, synthetic construct
  source 1..20: mol_type = other DNA
gcttagaagatttgcctgct

SEQ ID NO: 278671 - DNA, 20 bp, synthetic construct
  source 1..20: mol_type = other DNA
ggcttagaagatttgcctgc

SEQ ID NO: 278672 - DNA, 20 bp, synthetic construct
  source 1..20: mol_type = other DNA
aggcttagaagatttgcctg

SEQ ID NO: 278673 - DNA, 20 bp, synthetic construct
  source 1..20: mol_type = other DNA
aaggcttagaagatttgcct

SEQ ID NO: 278674 - DNA, 20 bp, synthetic construct
  source 1..20: mol_type = other DNA
taaggcttagaagatttgcc

SEQ ID NO: 278675 - DNA, 20 bp, synthetic construct
  source 1..20: mol_type = other DNA
ataaggcttagaagatttgc

SEQ ID NO: 278676 - DNA, 20 bp, synthetic construct
  source 1..20: mol_type = other DNA
gataaggcttagaagatttg

SEQ ID NO: 278677 - DNA, 20 bp, synthetic construct
  source 1..20: mol_type = other DNA
ggataaggcttagaagattt

SEQ ID NO: 278678 - DNA, 20 bp, synthetic construct
  source 1..20: mol_type = other DNA
tggataaggcttagaagatt

SEQ ID NO: 278679 - DNA, 20 bp, synthetic construct
  source 1..20: mol_type = other DNA
gtggataaggcttagaagat

SEQ ID NO: 278680 - DNA, 20 bp, synthetic construct
  source 1..20: mol_type = other DNA
agtggataaggcttagaaga

SEQ ID NO: 278681 - DNA, 20 bp, synthetic construct
  source 1..20: mol_type = other DNA
cagtggataaggcttagaag

SEQ ID NO: 278682 - DNA, 20 bp, synthetic construct
  source 1..20: mol_type = other DNA
tcagtggataaggcttagaa

SEQ ID NO: 278683 - DNA, 20 bp, synthetic construct
  source 1..20: mol_type = other DNA
ttcagtggataaggcttaga

SEQ ID NO: 278684 - DNA, 20 bp, synthetic construct
  source 1..20: mol_type = other DNA
tttcagtggataaggcttag

SEQ ID NO: 278685 - DNA, 20 bp, synthetic construct
  source 1..20: mol_type = other DNA
ttttcagtggataaggctta

SEQ ID NO: 278686 - DNA, 20 bp, synthetic construct
  source 1..20: mol_type = other DNA
cttttcagtggataaggctt

SEQ ID NO: 278687 - DNA, 20 bp, synthetic construct
  source 1..20: mol_type = other DNA
acttttcagtggataaggct

SEQ ID NO: 278688 - DNA, 20 bp, synthetic construct
  source 1..20: mol_type = other DNA
aacttttcagtggataaggc

SEQ ID NO: 278689 - DNA, 20 bp, synthetic construct
  source 1..20: mol_type = other DNA
taacttttcagtggataagg

SEQ ID NO: 278690 - DNA, 20 bp, synthetic construct
  source 1..20: mol_type = other DNA
ataacttttcagtggataag

SEQ ID NO: 278691 - DNA, 20 bp, synthetic construct
  source 1..20: mol_type = other DNA
cataacttttcagtggataa

SEQ ID NO: 278692 - DNA, 20 bp, synthetic construct
  source 1..20: mol_type = other DNA
tcataacttttcagtggata

SEQ ID NO: 278693 - DNA, 20 bp, synthetic construct
  source 1..20: mol_type = other DNA
ttcataacttttcagtggat

SEQ ID NO: 278694 - DNA, 20 bp, synthetic construct
  source 1..20: mol_type = other DNA
attcataacttttcagtgga

SEQ ID NO: 278695 - DNA, 20 bp, synthetic construct
  source 1..20: mol_type = other DNA
tattcataacttttcagtgg

SEQ ID NO: 278696 - DNA, 20 bp, synthetic construct
  source 1..20: mol_type = other DNA
ttattcataacttttcagtg

SEQ ID NO: 278697 - DNA, 20 bp, synthetic construct
  source 1..20: mol_type = other DNA
tttattcataacttttcagt

SEQ ID NO: 278698 - DNA, 20 bp, synthetic construct
  source 1..20: mol_type = other DNA
ttttattcataacttttcag

SEQ ID NO: 278699 - DNA, 20 bp, synthetic construct
  source 1..20: mol_type = other DNA
tttttattcataacttttca

SEQ ID NO: 278700 - DNA, 20 bp, synthetic construct
  source 1..20: mol_type = other DNA
ttttttattcataacttttc

SEQ ID NO: 278701 - DNA, 20 bp, synthetic construct
  source 1..20: mol_type = other DNA
attttttattcataactttt

SEQ ID NO: 278702 - DNA, 20 bp, synthetic construct
  source 1..20: mol_type = other DNA
cattttttattcataacttt

SEQ ID NO: 278703 - DNA, 20 bp, synthetic construct
  source 1..20: mol_type = other DNA
tcattttttattcataactt

SEQ ID NO: 278704 - DNA, 20 bp, synthetic construct
  source 1..20: mol_type = other DNA
atcattttttattcataact

SEQ ID NO: 278705 - DNA, 20 bp, synthetic construct
  source 1..20: mol_type = other DNA
gatcattttttattcataac

SEQ ID NO: 278706 - DNA, 20 bp, synthetic construct
  source 1..20: mol_type = other DNA
cgatcattttttattcataa

SEQ ID NO: 278707 - DNA, 20 bp, synthetic construct
  source 1..20: mol_type = other DNA
acgatcattttttattcata

SEQ ID NO: 278708 - DNA, 20 bp, synthetic construct
  source 1..20: mol_type = other DNA
gacgatcattttttattcat

SEQ ID NO: 278709 - DNA, 20 bp, synthetic construct
  source 1..20: mol_type = other DNA
tgacgatcattttttattca

SEQ ID NO: 278710 - DNA, 20 bp, synthetic construct
  source 1..20: mol_type = other DNA
ttgacgatcattttttattc

SEQ ID NO: 278711 - DNA, 20 bp, synthetic construct
  source 1..20: mol_type = other DNA
cttgacgatcattttttatt

SEQ ID NO: 278712 - DNA, 20 bp, synthetic construct
  source 1..20: mol_type = other DNA
gcttgacgatcattttttat

SEQ ID NO: 278713 - DNA, 20 bp, synthetic construct
  source 1..20: mol_type = other DNA
ggcttgacgatcatttttta

SEQ ID NO: 278714 - DNA, 20 bp, synthetic construct
  source 1..20: mol_type = other DNA
aggcttgacgatcatttttt

SEQ ID NO: 278715 - DNA, 20 bp, synthetic construct
  source 1..20: mol_type = other DNA
taggcttgacgatcattttt

SEQ ID NO: 278716 - DNA, 20 bp, synthetic construct
  source 1..20: mol_type = other DNA
gtaggcttgacgatcatttt

SEQ ID NO: 278717 - DNA, 20 bp, synthetic construct
  source 1..20: mol_type = other DNA
tgtaggcttgacgatcattt

SEQ ID NO: 278718 - DNA, 20 bp, synthetic construct
  source 1..20: mol_type = other DNA
ctgtaggcttgacgatcatt

SEQ ID NO: 278719 - DNA, 20 bp, synthetic construct
  source 1..20: mol_type = other DNA
cctgtaggcttgacgatcat

SEQ ID NO: 278720 - DNA, 20 bp, synthetic construct
  source 1..20: mol_type = other DNA
acctgtaggcttgacgatca

SEQ ID NO: 278721 - DNA, 20 bp, synthetic construct
  source 1..20: mol_type = other DNA
cacctgtaggcttgacgatc

SEQ ID NO: 278722 - DNA, 20 bp, synthetic construct
  source 1..20: mol_type = other DNA
gcacctgtaggcttgacgat

SEQ ID NO: 278723 - DNA, 20 bp, synthetic construct
  source 1..20: mol_type = other DNA
agcacctgtaggcttgacga

SEQ ID NO: 278724 - DNA, 20 bp, synthetic construct
  source 1..20: mol_type = other DNA
cagcacctgtaggcttgacg

SEQ ID NO: 278725 - DNA, 20 bp, synthetic construct
  source 1..20: mol_type = other DNA
tcagcacctgtaggcttgac

SEQ ID NO: 278726 - DNA, 20 bp, synthetic construct
  source 1..20: mol_type = other DNA
ctcagcacctgtaggcttga

SEQ ID NO: 278727 - DNA, 20 bp, synthetic construct
  source 1..20: mol_type = other DNA
cctcagcacctgtaggcttg

SEQ ID NO: 278728 - DNA, 20 bp, synthetic construct
  source 1..20: mol_type = other DNA
gcctcagcacctgtaggctt

SEQ ID NO: 278729 - DNA, 20 bp, synthetic construct
  source 1..20: mol_type = other DNA
agcctcagcacctgtaggct

SEQ ID NO: 278730 - DNA, 20 bp, synthetic construct
  source 1..20: mol_type = other DNA
tagcctcagcacctgtaggc

SEQ ID NO: 278731 - DNA, 20 bp, synthetic construct
  source 1..20: mol_type = other DNA
gtagcctcagcacctgtagg

SEQ ID NO: 278732 - DNA, 20 bp, synthetic construct
  source 1..20: mol_type = other DNA
agtagcctcagcacctgtag

SEQ ID NO: 278733 - DNA, 20 bp, synthetic construct
  source 1..20: mol_type = other DNA
gagtagcctcagcacctgta

SEQ ID NO: 278734 - DNA, 20 bp, synthetic construct
  source 1..20: mol_type = other DNA
ggagtagcctcagcacctgt

SEQ ID NO: 278735 - DNA, 20 bp, synthetic construct
  source 1..20: mol_type = other DNA
tggagtagcctcagcacctg

SEQ ID NO: 278736 - DNA, 20 bp, synthetic construct
  source 1..20: mol_type = other DNA
ctggagtagcctcagcacct

SEQ ID NO: 278737 - DNA, 20 bp, synthetic construct
  source 1..20: mol_type = other DNA
tctggagtagcctcagcacc

SEQ ID NO: 278738 - DNA, 20 bp, synthetic construct
  source 1..20: mol_type = other DNA
ctctggagtagcctcagcac

SEQ ID NO: 278739 - DNA, 20 bp, synthetic construct
  source 1..20: mol_type = other DNA
cctctggagtagcctcagca

SEQ ID NO: 278740 - DNA, 20 bp, synthetic construct
  source 1..20: mol_type = other DNA
gcctctggagtagcctcagc

SEQ ID NO: 278741 - DNA, 20 bp, synthetic construct
  source 1..20: mol_type = other DNA
agcctctggagtagcctcag

SEQ ID NO: 278742 - DNA, 20 bp, synthetic construct
  source 1..20: mol_type = other DNA
cagcctctggagtagcctca

SEQ ID NO: 278743 - DNA, 20 bp, synthetic construct
  source 1..20: mol_type = other DNA
tcagcctctggagtagcctc

SEQ ID NO: 278744 - DNA, 20 bp, synthetic construct
  source 1..20: mol_type = other DNA
ctcagcctctggagtagcct

SEQ ID NO: 278745 - DNA, 20 bp, synthetic construct
  source 1..20: mol_type = other DNA
cctcagcctctggagtagcc

SEQ ID NO: 278746 - DNA, 20 bp, synthetic construct
  source 1..20: mol_type = other DNA
gcctcagcctctggagtagc

SEQ ID NO: 278747 - DNA, 20 bp, synthetic construct
  source 1..20: mol_type = other DNA
ggcctcagcctctggagtag

SEQ ID NO: 278748 - DNA, 20 bp, synthetic construct
  source 1..20: mol_type = other DNA
tggcctcagcctctggagta

SEQ ID NO: 278749 - DNA, 20 bp, synthetic construct
  source 1..20: mol_type = other DNA
ctggcctcagcctctggagt

SEQ ID NO: 278750 - DNA, 20 bp, synthetic construct
  source 1..20: mol_type = other DNA
tctggcctcagcctctggag

SEQ ID NO: 278751 - DNA, 20 bp, synthetic construct
  source 1..20: mol_type = other DNA
ctctggcctcagcctctgga

SEQ ID NO: 278752 - DNA, 20 bp, synthetic construct
  source 1..20: mol_type = other DNA
cctctggcctcagcctctgg

SEQ ID NO: 278753 - DNA, 20 bp, synthetic construct
  source 1..20: mol_type = other DNA
tcctctggcctcagcctctg

SEQ ID NO: 278754 - DNA, 20 bp, synthetic construct
  source 1..20: mol_type = other DNA
gtcctctggcctcagcctct

SEQ ID NO: 278755 - DNA, 20 bp, synthetic construct
  source 1..20: mol_type = other DNA
ggtcctctggcctcagcctc

SEQ ID NO: 278756 - DNA, 20 bp, synthetic construct
  source 1..20: mol_type = other DNA
tggtcctctggcctcagcct

SEQ ID NO: 278757 - DNA, 20 bp, synthetic construct
  source 1..20: mol_type = other DNA
gtggtcctctggcctcagcc

SEQ ID NO: 278758 - DNA, 20 bp, synthetic construct
  source 1..20: mol_type = other DNA
agtggtcctctggcctcagc

SEQ ID NO: 278759 - DNA, 20 bp, synthetic construct
  source 1..20: mol_type = other DNA
aagtggtcctctggcctcag

SEQ ID NO: 278760 - DNA, 20 bp, synthetic construct
  source 1..20: mol_type = other DNA
caagtggtcctctggcctca

SEQ ID NO: 278761 - DNA, 20 bp, synthetic construct
  source 1..20: mol_type = other DNA
tcaagtggtcctctggcctc

SEQ ID NO: 278762 - DNA, 20 bp, synthetic construct
  source 1..20: mol_type = other DNA
ctcaagtggtcctctggcct

SEQ ID NO: 278763 - DNA, 20 bp, synthetic construct
  source 1..20: mol_type = other DNA
gctcaagtggtcctctggcc

SEQ ID NO: 278764 - DNA, 20 bp, synthetic construct
  source 1..20: mol_type = other DNA
ggctcaagtggtcctctggc

SEQ ID NO: 278765 - DNA, 20 bp, synthetic construct
  source 1..20: mol_type = other DNA
gggctcaagtggtcctctgg

SEQ ID NO: 278766 - DNA, 20 bp, synthetic construct
  source 1..20: mol_type = other DNA
tgggctcaagtggtcctctg

SEQ ID NO: 278767 - DNA, 20 bp, synthetic construct
  source 1..20: mol_type = other DNA
ctgggctcaagtggtcctct

SEQ ID NO: 278768 - DNA, 20 bp, synthetic construct
  source 1..20: mol_type = other DNA
cctgggctcaagtggtcctc

SEQ ID NO: 278769 - DNA, 20 bp, synthetic construct
  source 1..20: mol_type = other DNA
tcctgggctcaagtggtcct

SEQ ID NO: 278770 - DNA, 20 bp, synthetic construct
  source 1..20: mol_type = other DNA
ttcctgggctcaagtggtcc

SEQ ID NO: 278771 - DNA, 20 bp, synthetic construct
  source 1..20: mol_type = other DNA
attcctgggctcaagtggtc

SEQ ID NO: 278772 - DNA, 20 bp, synthetic construct
  source 1..20: mol_type = other DNA
aattcctgggctcaagtggt

SEQ ID NO: 278773 - DNA, 20 bp, synthetic construct
  source 1..20: mol_type = other DNA
aaattcctgggctcaagtgg

SEQ ID NO: 278774 - DNA, 20 bp, synthetic construct
  source 1..20: mol_type = other DNA
caaattcctgggctcaagtg

SEQ ID NO: 278775 - DNA, 20 bp, synthetic construct
  source 1..20: mol_type = other DNA
tcaaattcctgggctcaagt

SEQ ID NO: 278776 - DNA, 20 bp, synthetic construct
  source 1..20: mol_type = other DNA
ctcaaattcctgggctcaag

SEQ ID NO: 278777 - DNA, 20 bp, synthetic construct
  source 1..20: mol_type = other DNA
tctcaaattcctgggctcaa

SEQ ID NO: 278778 - DNA, 20 bp, synthetic construct
  source 1..20: mol_type = other DNA
gtctcaaattcctgggctca

SEQ ID NO: 278779 - DNA, 20 bp, synthetic construct
  source 1..20: mol_type = other DNA
ggtctcaaattcctgggctc

SEQ ID NO: 278780 - DNA, 20 bp, synthetic construct
  source 1..20: mol_type = other DNA
aggtctcaaattcctgggct

SEQ ID NO: 278781 - DNA, 20 bp, synthetic construct
  source 1..20: mol_type = other DNA
caggtctcaaattcctgggc

SEQ ID NO: 278782 - DNA, 20 bp, synthetic construct
  source 1..20: mol_type = other DNA
ccaggtctcaaattcctggg

SEQ ID NO: 278783 - DNA, 20 bp, synthetic construct
  source 1..20: mol_type = other DNA
cccaggtctcaaattcctgg

SEQ ID NO: 278784 - DNA, 20 bp, synthetic construct
  source 1..20: mol_type = other DNA
gcccaggtctcaaattcctg

SEQ ID NO: 278785 - DNA, 20 bp, synthetic construct
  source 1..20: mol_type = other DNA
agcccaggtctcaaattcct

SEQ ID NO: 278786 - DNA, 20 bp, synthetic construct
  source 1..20: mol_type = other DNA
cagcccaggtctcaaattcc

SEQ ID NO: 278787 - DNA, 20 bp, synthetic construct
  source 1..20: mol_type = other DNA
ccagcccaggtctcaaattc

SEQ ID NO: 278788 - DNA, 20 bp, synthetic construct
  source 1..20: mol_type = other DNA
cccagcccaggtctcaaatt

SEQ ID NO: 278789 - DNA, 20 bp, synthetic construct
  source 1..20: mol_type = other DNA
gcccagcccaggtctcaaat

SEQ ID NO: 278790 - DNA, 20 bp, synthetic construct
  source 1..20: mol_type = other DNA
tgcccagcccaggtctcaaa

SEQ ID NO: 278791 - DNA, 20 bp, synthetic construct
  source 1..20: mol_type = other DNA
ctgcccagcccaggtctcaa

SEQ ID NO: 278792 - DNA, 20 bp, synthetic construct
  source 1..20: mol_type = other DNA
gctgcccagcccaggtctca

SEQ ID NO: 278793 - DNA, 20 bp, synthetic construct
  source 1..20: mol_type = other DNA
tgctgcccagcccaggtctc

SEQ ID NO: 278794 - DNA, 20 bp, synthetic construct
  source 1..20: mol_type = other DNA
atgctgcccagcccaggtct

SEQ ID NO: 278795 - DNA, 20 bp, synthetic construct
  source 1..20: mol_type = other DNA
tatgctgcccagcccaggtc

SEQ ID NO: 278796 - DNA, 20 bp, synthetic construct
  source 1..20: mol_type = other DNA
ctatgctgcccagcccaggt

SEQ ID NO: 278797 - DNA, 20 bp, synthetic construct
  source 1..20: mol_type = other DNA
gctatgctgcccagcccagg

SEQ ID NO: 278798 - DNA, 20 bp, synthetic construct
  source 1..20: mol_type = other DNA
tgctatgctgcccagcccag

SEQ ID NO: 278799 - DNA, 20 bp, synthetic construct
  source 1..20: mol_type = other DNA
ttgctatgctgcccagccca

SEQ ID NO: 278800 - DNA, 20 bp, synthetic construct
  source 1..20: mol_type = other DNA
cttgctatgctgcccagccc

SEQ ID NO: 278801 - DNA, 20 bp, synthetic construct
  source 1..20: mol_type = other DNA
tcttgctatgctgcccagcc

SEQ ID NO: 278802 - DNA, 20 bp, synthetic construct
  source 1..20: mol_type = other DNA
gtcttgctatgctgcccagc

SEQ ID NO: 278803 - DNA, 20 bp, synthetic construct
  source 1..20: mol_type = other DNA
agtcttgctatgctgcccag

SEQ ID NO: 278804 - DNA, 20 bp, synthetic construct
  source 1..20: mol_type = other DNA
gagtcttgctatgctgccca

SEQ ID NO: 278805 - DNA, 20 bp, synthetic construct
  source 1..20: mol_type = other DNA
agagtcttgctatgctgccc

SEQ ID NO: 278806 - DNA, 20 bp, synthetic construct
  source 1..20: mol_type = other DNA
tagagtcttgctatgctgcc

SEQ ID NO: 278807 - DNA, 20 bp, synthetic construct
  source 1..20: mol_type = other DNA
atagagtcttgctatgctgc

SEQ ID NO: 278808 - DNA, 20 bp, synthetic construct
  source 1..20: mol_type = other DNA
gatagagtcttgctatgctg

SEQ ID NO: 278809 - DNA, 20 bp, synthetic construct
  source 1..20: mol_type = other DNA
agatagagtcttgctatgct

SEQ ID NO: 278810 - DNA, 20 bp, synthetic construct
  source 1..20: mol_type = other DNA
gagatagagtcttgctatgc

SEQ ID NO: 278811 - DNA, 20 bp, synthetic construct
  source 1..20: mol_type = other DNA
ggagatagagtcttgctatg

SEQ ID NO: 278812 - DNA, 20 bp, synthetic construct
  source 1..20: mol_type = other DNA
tggagatagagtcttgctat

SEQ ID NO: 278813 - DNA, 20 bp, synthetic construct
  source 1..20: mol_type = other DNA
atggagatagagtcttgcta

SEQ ID NO: 278814 - DNA, 20 bp, synthetic construct
  source 1..20: mol_type = other DNA
aatggagatagagtcttgct

SEQ ID NO: 278815 - DNA, 20 bp, synthetic construct
  source 1..20: mol_type = other DNA
taatggagatagagtcttgc

SEQ ID NO: 278816 - DNA, 20 bp, synthetic construct
  source 1..20: mol_type = other DNA
ttaatggagatagagtcttg

SEQ ID NO: 278817 - DNA, 20 bp, synthetic construct
  source 1..20: mol_type = other DNA
tttaatggagatagagtctt

SEQ ID NO: 278818 - DNA, 20 bp, synthetic construct
  source 1..20: mol_type = other DNA
ttttaatggagatagagtct

SEQ ID NO: 278819 - DNA, 20 bp, synthetic construct
  source 1..20: mol_type = other DNA
gttttaatggagatagagtc

SEQ ID NO: 278820 - DNA, 20 bp, synthetic construct
  source 1..20: mol_type = other DNA
agttttaatggagatagagt

SEQ ID NO: 278821 - DNA, 20 bp, synthetic construct
  source 1..20: mol_type = other DNA
tagttttaatggagatagag

SEQ ID NO: 278822 - DNA, 20 bp, synthetic construct
  source 1..20: mol_type = other DNA
atagttttaatggagataga

SEQ ID NO: 278823 - DNA, 20 bp, synthetic construct
  source 1..20: mol_type = other DNA
aatagttttaatggagatag

SEQ ID NO: 278824 - DNA, 20 bp, synthetic construct
  source 1..20: mol_type = other DNA
aaatagttttaatggagata

SEQ ID NO: 278825 - DNA, 20 bp, synthetic construct
  source 1..20: mol_type = other DNA
aaaatagttttaatggagat

SEQ ID NO: 278826 - DNA, 20 bp, synthetic construct
  source 1..20: mol_type = other DNA
aaaaatagttttaatggaga

SEQ ID NO: 278827 - DNA, 20 bp, synthetic construct
  source 1..20: mol_type = other DNA
aaaaaatagttttaatggag

SEQ ID NO: 278828 - DNA, 20 bp, synthetic construct
  source 1..20: mol_type = other DNA
aaaaaaatagttttaatgga

SEQ ID NO: 278829 - DNA, 20 bp, synthetic construct
  source 1..20: mol_type = other DNA
aaaaaaaatagttttaatgg

SEQ ID NO: 278830 - DNA, 20 bp, synthetic construct
  source 1..20: mol_type = other DNA
aaaaaaaaatagttttaatg

SEQ ID NO: 278831 - DNA, 20 bp, synthetic construct
  source 1..20: mol_type = other DNA
taaaaaaaaatagttttaat

SEQ ID NO: 278832 - DNA, 20 bp, synthetic construct
  source 1..20: mol_type = other DNA
ataaaaaaaaatagttttaa

SEQ ID NO: 278833 - DNA, 20 bp, synthetic construct
  source 1..20: mol_type = other DNA
aataaaaaaaaatagtttta

SEQ ID NO: 278834 - DNA, 20 bp, synthetic construct
  source 1..20: mol_type = other DNA
aaataaaaaaaaatagtttt

SEQ ID NO: 278835 - DNA, 20 bp, synthetic construct
  source 1..20: mol_type = other DNA
taaataaaaaaaaatagttt

SEQ ID NO: 278836 - DNA, 20 bp, synthetic construct
  source 1..20: mol_type = other DNA
ttaaataaaaaaaaatagtt

SEQ ID NO: 278837 - DNA, 20 bp, synthetic construct
  source 1..20: mol_type = other DNA
tttaaataaaaaaaaatagt

SEQ ID NO: 278838 - DNA, 20 bp, synthetic construct
  source 1..20: mol_type = other DNA
ttttaaataaaaaaaaatag

SEQ ID NO: 278839 - DNA, 20 bp, synthetic construct
  source 1..20: mol_type = other DNA
tttttaaataaaaaaaaata

SEQ ID NO: 278840 - DNA, 20 bp, synthetic construct
  source 1..20: mol_type = other DNA
ttttttaaataaaaaaaaat

SEQ ID NO: 278841 - DNA, 20 bp, synthetic construct
  source 1..20: mol_type = other DNA
attttttaaataaaaaaaaa

SEQ ID NO: 278842 - DNA, 20 bp, synthetic construct
  source 1..20: mol_type = other DNA
tattttttaaataaaaaaaa

SEQ ID NO: 278843 - DNA, 20 bp, synthetic construct
  source 1..20: mol_type = other DNA
ttattttttaaataaaaaaa

SEQ ID NO: 278844 - DNA, 20 bp, synthetic construct
  source 1..20: mol_type = other DNA
attattttttaaataaaaaa

SEQ ID NO: 278845 - DNA, 20 bp, synthetic construct
  source 1..20: mol_type = other DNA
gattattttttaaataaaaa

SEQ ID NO: 278846 - DNA, 20 bp, synthetic construct
  source 1..20: mol_type = other DNA
ggattattttttaaataaaa

SEQ ID NO: 278847 - DNA, 20 bp, synthetic construct
  source 1..20: mol_type = other DNA
cggattattttttaaataaa

SEQ ID NO: 278848 - DNA, 20 bp, synthetic construct
  source 1..20: mol_type = other DNA
gcggattattttttaaataa

SEQ ID NO: 278849 - DNA, 20 bp, synthetic construct
  source 1..20: mol_type = other DNA
tgcggattattttttaaata

SEQ ID NO: 278850 - DNA, 20 bp, synthetic construct
  source 1..20: mol_type = other DNA
ttgcggattattttttaaat

SEQ ID NO: 278851 - DNA, 20 bp, synthetic construct
  source 1..20: mol_type = other DNA
tttgcggattattttttaaa

SEQ ID NO: 278852 - DNA, 20 bp, synthetic construct
  source 1..20: mol_type = other DNA
ctttgcggattattttttaa

SEQ ID NO: 278853 - DNA, 20 bp, synthetic construct
  source 1..20: mol_type = other DNA
tctttgcggattatttttta

SEQ ID NO: 278854 - DNA, 20 bp, synthetic construct
  source 1..20: mol_type = other DNA
ttctttgcggattatttttt

SEQ ID NO: 278855 - DNA, 20 bp, synthetic construct
  source 1..20: mol_type = other DNA
cttctttgcggattattttt

SEQ ID NO: 278856 - DNA, 20 bp, synthetic construct
  source 1..20: mol_type = other DNA
ccttctttgcggattatttt

SEQ ID NO: 278857 - DNA, 20 bp, synthetic construct
  source 1..20: mol_type = other DNA
tccttctttgcggattattt

SEQ ID NO: 278858 - DNA, 20 bp, synthetic construct
  source 1..20: mol_type = other DNA
ctccttctttgcggattatt

SEQ ID NO: 278859 - DNA, 20 bp, synthetic construct
  source 1..20: mol_type = other DNA
actccttctttgcggattat

SEQ ID NO: 278860 - DNA, 20 bp, synthetic construct
  source 1..20: mol_type = other DNA
aactccttctttgcggatta

SEQ ID NO: 278861 - DNA, 20 bp, synthetic construct
  source 1..20: mol_type = other DNA
aaactccttctttgcggatt

SEQ ID NO: 278862 - DNA, 20 bp, synthetic construct
  source 1..20: mol_type = other DNA
taaactccttctttgcggat

SEQ ID NO: 278863 - DNA, 20 bp, synthetic construct
  source 1..20: mol_type = other DNA
ataaactccttctttgcgga

SEQ ID NO: 278864 - DNA, 20 bp, synthetic construct
  source 1..20: mol_type = other DNA
cataaactccttctttgcgg

SEQ ID NO: 278865 - DNA, 20 bp, synthetic construct
  source 1..20: mol_type = other DNA
acataaactccttctttgcg

SEQ ID NO: 278866 - DNA, 20 bp, synthetic construct
  source 1..20: mol_type = other DNA
cacataaactccttctttgc

SEQ ID NO: 278867 - DNA, 20 bp, synthetic construct
  source 1..20: mol_type = other DNA
ccacataaactccttctttg

SEQ ID NO: 278868 - DNA, 20 bp, synthetic construct
  source 1..20: mol_type = other DNA
cccacataaactccttcttt

SEQ ID NO: 278869 - DNA, 20 bp, synthetic construct
  source 1..20: mol_type = other DNA
tcccacataaactccttctt

SEQ ID NO: 278870 - DNA, 20 bp, synthetic construct
  source 1..20: mol_type = other DNA
atcccacataaactccttct

SEQ ID NO: 278871 - DNA, 20 bp, synthetic construct
  source 1..20: mol_type = other DNA
aatcccacataaactccttc

SEQ ID NO: 278872 - DNA, 20 bp, synthetic construct
  source 1..20: mol_type = other DNA
gaatcccacataaactcctt

SEQ ID NO: 278873 - DNA, 20 bp, synthetic construct
  source 1..20: mol_type = other DNA
ggaatcccacataaactcct

SEQ ID NO: 278874 - DNA, 20 bp, synthetic construct
  source 1..20: mol_type = other DNA
aggaatcccacataaactcc

SEQ ID NO: 278875 - DNA, 20 bp, synthetic construct
  source 1..20: mol_type = other DNA
aaggaatcccacataaactc

SEQ ID NO: 278876 - DNA, 20 bp, synthetic construct
  source 1..20: mol_type = other DNA
taaggaatcccacataaact

SEQ ID NO: 278877 - DNA, 20 bp, synthetic construct
  source 1..20: mol_type = other DNA
ttaaggaatcccacataaac

SEQ ID NO: 278878 - DNA, 20 bp, synthetic construct
  source 1..20: mol_type = other DNA
tttaaggaatcccacataaa

SEQ ID NO: 278879 - DNA, 20 bp, synthetic construct
  source 1..20: mol_type = other DNA
ttttaaggaatcccacataa

SEQ ID NO: 278880 - DNA, 20 bp, synthetic construct
  source 1..20: mol_type = other DNA
attttaaggaatcccacata

SEQ ID NO: 278881 - DNA, 20 bp, synthetic construct
  source 1..20: mol_type = other DNA
gattttaaggaatcccacat

SEQ ID NO: 278882 - DNA, 20 bp, synthetic construct
  source 1..20: mol_type = other DNA
cgattttaaggaatcccaca

SEQ ID NO: 278883 - DNA, 20 bp, synthetic construct
  source 1..20: mol_type = other DNA
ccgattttaaggaatcccac

SEQ ID NO: 278884 - DNA, 20 bp, synthetic construct
  source 1..20: mol_type = other DNA
tccgattttaaggaatccca

SEQ ID NO: 278885 - DNA, 20 bp, synthetic construct
  source 1..20: mol_type = other DNA
ctccgattttaaggaatccc

SEQ ID NO: 278886 - DNA, 20 bp, synthetic construct
  source 1..20: mol_type = other DNA
cctccgattttaaggaatcc

SEQ ID NO: 278887 - DNA, 20 bp, synthetic construct
  source 1..20: mol_type = other DNA
ccctccgattttaaggaatc

SEQ ID NO: 278888 - DNA, 20 bp, synthetic construct
  source 1..20: mol_type = other DNA
accctccgattttaaggaat

SEQ ID NO: 278889 - DNA, 20 bp, synthetic construct
  source 1..20: mol_type = other DNA
caccctccgattttaaggaa

SEQ ID NO: 278890 - DNA, 20 bp, synthetic construct
  source 1..20: mol_type = other DNA
ccaccctccgattttaagga

SEQ ID NO: 278891 - DNA, 20 bp, synthetic construct
  source 1..20: mol_type = other DNA
gccaccctccgattttaagg

SEQ ID NO: 278892 - DNA, 20 bp, synthetic construct
  source 1..20: mol_type = other DNA
tgccaccctccgattttaag

SEQ ID NO: 278893 - DNA, 20 bp, synthetic construct
  source 1..20: mol_type = other DNA
atgccaccctccgattttaa

SEQ ID NO: 278894 - DNA, 20 bp, synthetic construct
  source 1..20: mol_type = other DNA
catgccaccctccgatttta

SEQ ID NO: 278895 - DNA, 20 bp, synthetic construct
  source 1..20: mol_type = other DNA
tcatgccaccctccgatttt

SEQ ID NO: 278896 - DNA, 20 bp, synthetic construct
  source 1..20: mol_type = other DNA
ttcatgccaccctccgattt

SEQ ID NO: 278897 - DNA, 20 bp, synthetic construct
  source 1..20: mol_type = other DNA
attcatgccaccctccgatt

SEQ ID NO: 278898 - DNA, 20 bp, synthetic construct
  source 1..20: mol_type = other DNA
aattcatgccaccctccgat

SEQ ID NO: 278899 - DNA, 20 bp, synthetic construct
  source 1..20: mol_type = other DNA
caattcatgccaccctccga

SEQ ID NO: 278900 - DNA, 20 bp, synthetic construct
  source 1..20: mol_type = other DNA
tcaattcatgccaccctccg

SEQ ID NO: 278901 - DNA, 20 bp, synthetic construct
  source 1..20: mol_type = other DNA
atcaattcatgccaccctcc

SEQ ID NO: 278902 - DNA, 20 bp, synthetic construct
  source 1..20: mol_type = other DNA
aatcaattcatgccaccctc

SEQ ID NO: 278903 - DNA, 20 bp, synthetic construct
  source 1..20: mol_type = other DNA
gaatcaattcatgccaccct

SEQ ID NO: 278904 - DNA, 20 bp, synthetic construct
  source 1..20: mol_type = other DNA
tgaatcaattcatgccaccc

SEQ ID NO: 278905 - DNA, 20 bp, synthetic construct
  source 1..20: mol_type = other DNA
ttgaatcaattcatgccacc

SEQ ID NO: 278906 - DNA, 20 bp, synthetic construct
  source 1..20: mol_type = other DNA
tttgaatcaattcatgccac

SEQ ID NO: 278907 - DNA, 20 bp, synthetic construct
  source 1..20: mol_type = other DNA
ctttgaatcaattcatgcca

SEQ ID NO: 278908 - DNA, 20 bp, synthetic construct
  source 1..20: mol_type = other DNA
tctttgaatcaattcatgcc

SEQ ID NO: 278909 - DNA, 20 bp, synthetic construct
  source 1..20: mol_type = other DNA
gtctttgaatcaattcatgc

SEQ ID NO: 278910 - DNA, 20 bp, synthetic construct
  source 1..20: mol_type = other DNA
agtctttgaatcaattcatg

SEQ ID NO: 278911 - DNA, 20 bp, synthetic construct
  source 1..20: mol_type = other DNA
aagtctttgaatcaattcat

SEQ ID NO: 278912 - DNA, 20 bp, synthetic construct
  source 1..20: mol_type = other DNA
caagtctttgaatcaattca

SEQ ID NO: 278913 - DNA, 20 bp, synthetic construct
  source 1..20: mol_type = other DNA
acaagtctttgaatcaattc

SEQ ID NO: 278914 - DNA, 20 bp, synthetic construct
  source 1..20: mol_type = other DNA
cacaagtctttgaatcaatt

SEQ ID NO: 278915 - DNA, 20 bp, synthetic construct
  source 1..20: mol_type = other DNA
gcacaagtctttgaatcaat

SEQ ID NO: 278916 - DNA, 20 bp, synthetic construct
  source 1..20: mol_type = other DNA
tgcacaagtctttgaatcaa

SEQ ID NO: 278917 - DNA, 20 bp, synthetic construct
  source 1..20: mol_type = other DNA
ctgcacaagtctttgaatca

SEQ ID NO: 278918 - DNA, 20 bp, synthetic construct
  source 1..20: mol_type = other DNA
tctgcacaagtctttgaatc

SEQ ID NO: 278919 - DNA, 20 bp, synthetic construct
  source 1..20: mol_type = other DNA
ctctgcacaagtctttgaat

SEQ ID NO: 278920 - DNA, 20 bp, synthetic construct
  source 1..20: mol_type = other DNA
cctctgcacaagtctttgaa

SEQ ID NO: 278921 - DNA, 20 bp, synthetic construct
  source 1..20: mol_type = other DNA
ccctctgcacaagtctttga

SEQ ID NO: 278922 - DNA, 20 bp, synthetic construct
  source 1..20: mol_type = other DNA
gccctctgcacaagtctttg

SEQ ID NO: 278923 - DNA, 20 bp, synthetic construct
  source 1..20: mol_type = other DNA
cgccctctgcacaagtcttt

SEQ ID NO: 278924 - DNA, 20 bp, synthetic construct
  source 1..20: mol_type = other DNA
tcgccctctgcacaagtctt

SEQ ID NO: 278925 - DNA, 20 bp, synthetic construct
  source 1..20: mol_type = other DNA
gtcgccctctgcacaagtct

SEQ ID NO: 278926 - DNA, 20 bp, synthetic construct
  source 1..20: mol_type = other DNA
tgtcgccctctgcacaagtc

SEQ ID NO: 278927 - DNA, 20 bp, synthetic construct
  source 1..20: mol_type = other DNA
ctgtcgccctctgcacaagt

SEQ ID NO: 278928 - DNA, 20 bp, synthetic construct
  source 1..20: mol_type = other DNA
actgtcgccctctgcacaag

SEQ ID NO: 278929 - DNA, 20 bp, synthetic construct
  source 1..20: mol_type = other DNA
cactgtcgccctctgcacaa

SEQ ID NO: 278930 - DNA, 20 bp, synthetic construct
  source 1..20: mol_type = other DNA
tcactgtcgccctctgcaca

SEQ ID NO: 278931 - DNA, 20 bp, synthetic construct
  source 1..20: mol_type = other DNA
gtcactgtcgccctctgcac

SEQ ID NO: 278932 - DNA, 20 bp, synthetic construct
  source 1..20: mol_type = other DNA
agtcactgtcgccctctgca

SEQ ID NO: 278933 - DNA, 20 bp, synthetic construct
  source 1..20: mol_type = other DNA
gagtcactgtcgccctctgc

SEQ ID NO: 278934 - DNA, 20 bp, synthetic construct
  source 1..20: mol_type = other DNA
ggagtcactgtcgccctctg

SEQ ID NO: 278935 - DNA, 20 bp, synthetic construct
  source 1..20: mol_type = other DNA
aggagtcactgtcgccctct

SEQ ID NO: 278936 - DNA, 20 bp, synthetic construct
  source 1..20: mol_type = other DNA
aaggagtcactgtcgccctc

SEQ ID NO: 278937 - DNA, 20 bp, synthetic construct
  source 1..20: mol_type = other DNA
caaggagtcactgtcgccct

SEQ ID NO: 278938 - DNA, 20 bp, synthetic construct
  source 1..20: mol_type = other DNA
tcaaggagtcactgtcgccc

SEQ ID NO: 278939 - DNA, 20 bp, synthetic construct
  source 1..20: mol_type = other DNA
ctcaaggagtcactgtcgcc

SEQ ID NO: 278940 - DNA, 20 bp, synthetic construct
  source 1..20: mol_type = other DNA
tctcaaggagtcactgtcgc

SEQ ID NO: 278941 - DNA, 20 bp, synthetic construct
  source 1..20: mol_type = other DNA
ttctcaaggagtcactgtcg

SEQ ID NO: 278942 - DNA, 20 bp, synthetic construct
  source 1..20: mol_type = other DNA
cttctcaaggagtcactgtc

SEQ ID NO: 278943 - DNA, 20 bp, synthetic construct
  source 1..20: mol_type = other DNA
gcttctcaaggagtcactgt

SEQ ID NO: 278944 - DNA, 20 bp, synthetic construct
  source 1..20: mol_type = other DNA
tgcttctcaaggagtcactg

SEQ ID NO: 278945 - DNA, 20 bp, synthetic construct
  source 1..20: mol_type = other DNA
ctgcttctcaaggagtcact

SEQ ID NO: 278946 - DNA, 20 bp, synthetic construct
  source 1..20: mol_type = other DNA
actgcttctcaaggagtcac

SEQ ID NO: 278947 - DNA, 20 bp, synthetic construct
  source 1..20: mol_type = other DNA
cactgcttctcaaggagtca

SEQ ID NO: 278948 - DNA, 20 bp, synthetic construct
  source 1..20: mol_type = other DNA
acactgcttctcaaggagtc

SEQ ID NO: 278949 - DNA, 20 bp, synthetic construct
  source 1..20: mol_type = other DNA
cacactgcttctcaaggagt

SEQ ID NO: 278950 - DNA, 20 bp, synthetic construct
  source 1..20: mol_type = other DNA
tcacactgcttctcaaggag

SEQ ID NO: 278951 - DNA, 20 bp, synthetic construct
  source 1..20: mol_type = other DNA
ctcacactgcttctcaagga

SEQ ID NO: 278952 - DNA, 20 bp, synthetic construct
  source 1..20: mol_type = other DNA
tctcacactgcttctcaagg

SEQ ID NO: 278953 - DNA, 20 bp, synthetic construct
  source 1..20: mol_type = other DNA
ttctcacactgcttctcaag

SEQ ID NO: 278954 - DNA, 20 bp, synthetic construct
  source 1..20: mol_type = other DNA
tttctcacactgcttctcaa

SEQ ID NO: 278955 - DNA, 20 bp, synthetic construct
  source 1..20: mol_type = other DNA
ctttctcacactgcttctca

SEQ ID NO: 278956 - DNA, 20 bp, synthetic construct
  source 1..20: mol_type = other DNA
gctttctcacactgcttctc

SEQ ID NO: 278957 - DNA, 20 bp, synthetic construct
  source 1..20: mol_type = other DNA
ggctttctcacactgcttct

SEQ ID NO: 278958 - DNA, 20 bp, synthetic construct
  source 1..20: mol_type = other DNA
aggctttctcacactgcttc

SEQ ID NO: 278959 - DNA, 20 bp, synthetic construct
  source 1..20: mol_type = other DNA
caggctttctcacactgctt

SEQ ID NO: 278960 - DNA, 20 bp, synthetic construct
  source 1..20: mol_type = other DNA
acaggctttctcacactgct

SEQ ID NO: 278961 - DNA, 20 bp, synthetic construct
  source 1..20: mol_type = other DNA
gacaggctttctcacactgc

SEQ ID NO: 278962 - DNA, 20 bp, synthetic construct
  source 1..20: mol_type = other DNA
ggacaggctttctcacactg

SEQ ID NO: 278963 - DNA, 20 bp, synthetic construct
  source 1..20: mol_type = other DNA
gggacaggctttctcacact

SEQ ID NO: 278964 - DNA, 20 bp, synthetic construct
  source 1..20: mol_type = other DNA
tgggacaggctttctcacac

SEQ ID NO: 278965 - DNA, 20 bp, synthetic construct
  source 1..20: mol_type = other DNA
gtgggacaggctttctcaca

SEQ ID NO: 278966 - DNA, 20 bp, synthetic construct
  source 1..20: mol_type = other DNA
ggtgggacaggctttctcac

SEQ ID NO: 278967 - DNA, 20 bp, synthetic construct
  source 1..20: mol_type = other DNA
aggtgggacaggctttctca

SEQ ID NO: 278968 - DNA, 20 bp, synthetic construct
  source 1..20: mol_type = other DNA
gaggtgggacaggctttctc

SEQ ID NO: 278969 - DNA, 20 bp, synthetic construct
  source 1..20: mol_type = other DNA
ggaggtgggacaggctttct

SEQ ID NO: 278970 - DNA, 20 bp, synthetic construct
  source 1..20: mol_type = other DNA
aggaggtgggacaggctttc

SEQ ID NO: 278971 - DNA, 20 bp, synthetic construct
  source 1..20: mol_type = other DNA
aaggaggtgggacaggcttt

SEQ ID NO: 278972 - DNA, 20 bp, synthetic construct
  source 1..20: mol_type = other DNA
gaaggaggtgggacaggctt

SEQ ID NO: 278973 - DNA, 20 bp, synthetic construct
  source 1..20: mol_type = other DNA
ggaaggaggtgggacaggct

SEQ ID NO: 278974 - DNA, 20 bp, synthetic construct
  source 1..20: mol_type = other DNA
cggaaggaggtgggacaggc

SEQ ID NO: 278975 - DNA, 20 bp, synthetic construct
  source 1..20: mol_type = other DNA
gcggaaggaggtgggacagg

SEQ ID NO: 278976 - DNA, 20 bp, synthetic construct
  source 1..20: mol_type = other DNA
tgcggaaggaggtgggacag

SEQ ID NO: 278977 - DNA, 20 bp, synthetic construct
  source 1..20: mol_type = other DNA
ctgcggaaggaggtgggaca

SEQ ID NO: 278978 - DNA, 20 bp, synthetic construct
  source 1..20: mol_type = other DNA
gctgcggaaggaggtgggac

SEQ ID NO: 278979 - DNA, 20 bp, synthetic construct
  source 1..20: mol_type = other DNA
agctgcggaaggaggtggga

SEQ ID NO: 278980 - DNA, 20 bp, synthetic construct
  source 1..20: mol_type = other DNA
gagctgcggaaggaggtggg

SEQ ID NO: 278981 - DNA, 20 bp, synthetic construct
  source 1..20: mol_type = other DNA
ggagctgcggaaggaggtgg

SEQ ID NO: 278982 - DNA, 20 bp, synthetic construct
  source 1..20: mol_type = other DNA
tggagctgcggaaggaggtg

SEQ ID NO: 278983 - DNA, 20 bp, synthetic construct
  source 1..20: mol_type = other DNA
ctggagctgcggaaggaggt

SEQ ID NO: 278984 - DNA, 20 bp, synthetic construct
  source 1..20: mol_type = other DNA
gctggagctgcggaaggagg

SEQ ID NO: 278985 - DNA, 20 bp, synthetic construct
  source 1..20: mol_type = other DNA
ggctggagctgcggaaggag

SEQ ID NO: 278986 - DNA, 20 bp, synthetic construct
  source 1..20: mol_type = other DNA
aggctggagctgcggaagga

SEQ ID NO: 278987 - DNA, 20 bp, synthetic construct
  source 1..20: mol_type = other DNA
caggctggagctgcggaagg

SEQ ID NO: 278988 - DNA, 20 bp, synthetic construct
  source 1..20: mol_type = other DNA
ccaggctggagctgcggaag

SEQ ID NO: 278989 - DNA, 20 bp, synthetic construct
  source 1..20: mol_type = other DNA
cccaggctggagctgcggaa

SEQ ID NO: 278990 - DNA, 20 bp, synthetic construct
  source 1..20: mol_type = other DNA
gcccaggctggagctgcgga

SEQ ID NO: 278991 - DNA, 20 bp, synthetic construct
  source 1..20: mol_type = other DNA
agcccaggctggagctgcgg

SEQ ID NO: 278992 - DNA, 20 bp, synthetic construct
  source 1..20: mol_type = other DNA
cagcccaggctggagctgcg

SEQ ID NO: 278993 - DNA, 20 bp, synthetic construct
  source 1..20: mol_type = other DNA
tcagcccaggctggagctgc

SEQ ID NO: 278994 - DNA, 20 bp, synthetic construct
  source 1..20: mol_type = other DNA
ctcagcccaggctggagctg

SEQ ID NO: 278995 - DNA, 20 bp, synthetic construct
  source 1..20: mol_type = other DNA
cctcagcccaggctggagct

SEQ ID NO: 278996 - DNA, 20 bp, synthetic construct
  source 1..20: mol_type = other DNA
gcctcagcccaggctggagc

SEQ ID NO: 278997 - DNA, 20 bp, synthetic construct
  source 1..20: mol_type = other DNA
tgcctcagcccaggctggag

SEQ ID NO: 278998 - DNA, 20 bp, synthetic construct
  source 1..20: mol_type = other DNA
gtgcctcagcccaggctgga

SEQ ID NO: 278999 - DNA, 20 bp, synthetic construct
  source 1..20: mol_type = other DNA
agtgcctcagcccaggctgg

SEQ ID NO: 279000 - DNA, 20 bp, synthetic construct
  source 1..20: mol_type = other DNA
cagtgcctcagcccaggctg

SEQ ID NO: 279001 - DNA, 20 bp, synthetic construct
  source 1..20: mol_type = other DNA
acagtgcctcagcccaggct

SEQ ID NO: 279002 - DNA, 20 bp, synthetic construct
  source 1..20: mol_type = other DNA
gacagtgcctcagcccaggc

SEQ ID NO: 279003 - DNA, 20 bp, synthetic construct
  source 1..20: mol_type = other DNA
tgacagtgcctcagcccagg

SEQ ID NO: 279004 - DNA, 20 bp, synthetic construct
  source 1..20: mol_type = other DNA
gtgacagtgcctcagcccag

SEQ ID NO: 279005 - DNA, 20 bp, synthetic construct
  source 1..20: mol_type = other DNA
tgtgacagtgcctcagccca

SEQ ID NO: 279006 - DNA, 20 bp, synthetic construct
  source 1..20: mol_type = other DNA
ctgtgacagtgcctcagccc

SEQ ID NO: 279007 - DNA, 20 bp, synthetic construct
  source 1..20: mol_type = other DNA
actgtgacagtgcctcagcc

SEQ ID NO: 279008 - DNA, 20 bp, synthetic construct
  source 1..20: mol_type = other DNA
cactgtgacagtgcctcagc

SEQ ID NO: 279009 - DNA, 20 bp, synthetic construct
  source 1..20: mol_type = other DNA
acactgtgacagtgcctcag

SEQ ID NO: 279010 - DNA, 20 bp, synthetic construct
  source 1..20: mol_type = other DNA
gacactgtgacagtgcctca

SEQ ID NO: 279011 - DNA, 20 bp, synthetic construct
  source 1..20: mol_type = other DNA
agacactgtgacagtgcctc

SEQ ID NO: 279012 - DNA, 20 bp, synthetic construct
  source 1..20: mol_type = other DNA
gagacactgtgacagtgcct

SEQ ID NO: 279013 - DNA, 20 bp, synthetic construct
  source 1..20: mol_type = other DNA
ggagacactgtgacagtgcc

SEQ ID NO: 279014 - DNA, 20 bp, synthetic construct
  source 1..20: mol_type = other DNA
aggagacactgtgacagtgc

SEQ ID NO: 279015 - DNA, 20 bp, synthetic construct
  source 1..20: mol_type = other DNA
aaggagacactgtgacagtg

SEQ ID NO: 279016 - DNA, 20 bp, synthetic construct
  source 1..20: mol_type = other DNA
caaggagacactgtgacagt

SEQ ID NO: 279017 - DNA, 20 bp, synthetic construct
  source 1..20: mol_type = other DNA
gcaaggagacactgtgacag

SEQ ID NO: 279018 - DNA, 20 bp, synthetic construct
  source 1..20: mol_type = other DNA
agcaaggagacactgtgaca

SEQ ID NO: 279019 - DNA, 20 bp, synthetic construct
  source 1..20: mol_type = other DNA
cagcaaggagacactgtgac

SEQ ID NO: 279020 - DNA, 20 bp, synthetic construct
  source 1..20: mol_type = other DNA
ccagcaaggagacactgtga

SEQ ID NO: 279021 - DNA, 20 bp, synthetic construct
  source 1..20: mol_type = other DNA
gccagcaaggagacactgtg

SEQ ID NO: 279022 - DNA, 20 bp, synthetic construct
  source 1..20: mol_type = other DNA
tgccagcaaggagacactgt

SEQ ID NO: 279023 - DNA, 20 bp, synthetic construct
  source 1..20: mol_type = other DNA
ctgccagcaaggagacactg

SEQ ID NO: 279024 - DNA, 20 bp, synthetic construct
  source 1..20: mol_type = other DNA
cctgccagcaaggagacact

SEQ ID NO: 279025 - DNA, 20 bp, synthetic construct
  source 1..20: mol_type = other DNA
tcctgccagcaaggagacac

SEQ ID NO: 279026 - DNA, 20 bp, synthetic construct
  source 1..20: mol_type = other DNA
ctcctgccagcaaggagaca

SEQ ID NO: 279027 - DNA, 20 bp, synthetic construct
  source 1..20: mol_type = other DNA
tctcctgccagcaaggagac

SEQ ID NO: 279028 - DNA, 20 bp, synthetic construct
  source 1..20: mol_type = other DNA
ctctcctgccagcaaggaga

SEQ ID NO: 279029 - DNA, 20 bp, synthetic construct
  source 1..20: mol_type = other DNA
tctctcctgccagcaaggag

SEQ ID NO: 279030 - DNA, 20 bp, synthetic construct
  source 1..20: mol_type = other DNA
ttctctcctgccagcaagga

SEQ ID NO: 279031 - DNA, 20 bp, synthetic construct
  source 1..20: mol_type = other DNA
attctctcctgccagcaagg

SEQ ID NO: 279032 - DNA, 20 bp, synthetic construct
  source 1..20: mol_type = other DNA
aattctctcctgccagcaag

SEQ ID NO: 279033 - DNA, 20 bp, synthetic construct
  source 1..20: mol_type = other DNA
aaattctctcctgccagcaa

SEQ ID NO: 279034 - DNA, 20 bp, synthetic construct
  source 1..20: mol_type = other DNA
gaaattctctcctgccagca

SEQ ID NO: 279035 - DNA, 20 bp, synthetic construct
  source 1..20: mol_type = other DNA
tgaaattctctcctgccagc

SEQ ID NO: 279036 - DNA, 20 bp, synthetic construct
  source 1..20: mol_type = other DNA
ttgaaattctctcctgccag

SEQ ID NO: 279037 - DNA, 20 bp, synthetic construct
  source 1..20: mol_type = other DNA
gttgaaattctctcctgcca

SEQ ID NO: 279038 - DNA, 20 bp, synthetic construct
  source 1..20: mol_type = other DNA
tgttgaaattctctcctgcc

SEQ ID NO: 279039 - DNA, 20 bp, synthetic construct
  source 1..20: mol_type = other DNA
atgttgaaattctctcctgc

SEQ ID NO: 279040 - DNA, 20 bp, synthetic construct
  source 1..20: mol_type = other DNA
aatgttgaaattctctcctg

SEQ ID NO: 279041 - DNA, 20 bp, synthetic construct
  source 1..20: mol_type = other DNA
gaatgttgaaattctctcct

SEQ ID NO: 279042 - DNA, 20 bp, synthetic construct
  source 1..20: mol_type = other DNA
tgaatgttgaaattctctcc

SEQ ID NO: 279043 - DNA, 20 bp, synthetic construct
  source 1..20: mol_type = other DNA
gtgaatgttgaaattctctc

SEQ ID NO: 279044 - DNA, 20 bp, synthetic construct
  source 1..20: mol_type = other DNA
ggtgaatgttgaaattctct

SEQ ID NO: 279045 - DNA, 20 bp, synthetic construct
  source 1..20: mol_type = other DNA
tggtgaatgttgaaattctc

SEQ ID NO: 279046 - DNA, 20 bp, synthetic construct
  source 1..20: mol_type = other DNA
ttggtgaatgttgaaattct

SEQ ID NO: 279047 - DNA, 20 bp, synthetic construct
  source 1..20: mol_type = other DNA
tttggtgaatgttgaaattc

SEQ ID NO: 279048 - DNA, 20 bp, synthetic construct
  source 1..20: mol_type = other DNA
ttttggtgaatgttgaaatt

SEQ ID NO: 279049 - DNA, 20 bp, synthetic construct
  source 1..20: mol_type = other DNA
tttttggtgaatgttgaaat

SEQ ID NO: 279050 - DNA, 20 bp, synthetic construct
  source 1..20: mol_type = other DNA
ctttttggtgaatgttgaaa

SEQ ID NO: 279051 - DNA, 20 bp, synthetic construct
  source 1..20: mol_type = other DNA
actttttggtgaatgttgaa

SEQ ID NO: 279052 - DNA, 20 bp, synthetic construct
  source 1..20: mol_type = other DNA
tactttttggtgaatgttga

SEQ ID NO: 279053 - DNA, 20 bp, synthetic construct
  source 1..20: mol_type = other DNA
ctactttttggtgaatgttg

SEQ ID NO: 279054 - DNA, 20 bp, synthetic construct
  source 1..20: mol_type = other DNA
actactttttggtgaatgtt

SEQ ID NO: 279055 - DNA, 20 bp, synthetic construct
  source 1..20: mol_type = other DNA
tactactttttggtgaatgt

SEQ ID NO: 279056 - DNA, 20 bp, synthetic construct
  source 1..20: mol_type = other DNA
atactactttttggtgaatg

SEQ ID NO: 279057 - DNA, 20 bp, synthetic construct
  source 1..20: mol_type = other DNA
aatactactttttggtgaat

SEQ ID NO: 279058 - DNA, 20 bp, synthetic construct
  source 1..20: mol_type = other DNA
caatactactttttggtgaa

SEQ ID NO: 279059 - DNA, 20 bp, synthetic construct
  source 1..20: mol_type = other DNA
acaatactactttttggtga

SEQ ID NO: 279060 - DNA, 20 bp, synthetic construct
  source 1..20: mol_type = other DNA
aacaatactactttttggtg

SEQ ID NO: 279061 - DNA, 20 bp, synthetic construct
  source 1..20: mol_type = other DNA
aaacaatactactttttggt

SEQ ID NO: 279062 - DNA, 20 bp, synthetic construct
  source 1..20: mol_type = other DNA
aaaacaatactactttttgg

SEQ ID NO: 279063 - DNA, 20 bp, synthetic construct
  source 1..20: mol_type = other DNA
aaaaacaatactactttttg

SEQ ID NO: 279064 - DNA, 20 bp, synthetic construct
  source 1..20: mol_type = other DNA
taaaaacaatactacttttt

SEQ ID NO: 279065 - DNA, 20 bp, synthetic construct
  source 1..20: mol_type = other DNA
ataaaaacaatactactttt

SEQ ID NO: 279066 - DNA, 20 bp, synthetic construct
  source 1..20: mol_type = other DNA
aataaaaacaatactacttt

SEQ ID NO: 279067 - DNA, 20 bp, synthetic construct
  source 1..20: mol_type = other DNA
taataaaaacaatactactt

SEQ ID NO: 279068 - DNA, 20 bp, synthetic construct
  source 1..20: mol_type = other DNA
ctaataaaaacaatactact

SEQ ID NO: 279069 - DNA, 20 bp, synthetic construct
  source 1..20: mol_type = other DNA
cctaataaaaacaatactac

SEQ ID NO: 279070 - DNA, 20 bp, synthetic construct
  source 1..20: mol_type = other DNA
acctaataaaaacaatacta

SEQ ID NO: 279071 - DNA, 20 bp, synthetic construct
  source 1..20: mol_type = other DNA
aacctaataaaaacaatact

SEQ ID NO: 279072 - DNA, 20 bp, synthetic construct
  source 1..20: mol_type = other DNA
aaacctaataaaaacaatac

SEQ ID NO: 279073 - DNA, 20 bp, synthetic construct
  source 1..20: mol_type = other DNA
taaacctaataaaaacaata

SEQ ID NO: 279074 - DNA, 20 bp, synthetic construct
  source 1..20: mol_type = other DNA
ataaacctaataaaaacaat

SEQ ID NO: 279075 - DNA, 20 bp, synthetic construct
  source 1..20: mol_type = other DNA
cataaacctaataaaaacaa

SEQ ID NO: 279076 - DNA, 20 bp, synthetic construct
  source 1..20: mol_type = other DNA
tcataaacctaataaaaaca

SEQ ID NO: 279077 - DNA, 20 bp, synthetic construct
  source 1..20: mol_type = other DNA
ctcataaacctaataaaaac

SEQ ID NO: 279078 - DNA, 20 bp, synthetic construct
  source 1..20: mol_type = other DNA
cctcataaacctaataaaaa

SEQ ID NO: 279079 - DNA, 20 bp, synthetic construct
  source 1..20: mol_type = other DNA
gcctcataaacctaataaaa

SEQ ID NO: 279080 - DNA, 20 bp, synthetic construct
  source 1..20: mol_type = other DNA
agcctcataaacctaataaa

SEQ ID NO: 279081 - DNA, 20 bp, synthetic construct
  source 1..20: mol_type = other DNA
cagcctcataaacctaataa

SEQ ID NO: 279082 - DNA, 20 bp, synthetic construct
  source 1..20: mol_type = other DNA
acagcctcataaacctaata

SEQ ID NO: 279083 - DNA, 20 bp, synthetic construct
  source 1..20: mol_type = other DNA
tacagcctcataaacctaat

SEQ ID NO: 279084 - DNA, 20 bp, synthetic construct
  source 1..20: mol_type = other DNA
ctacagcctcataaacctaa

SEQ ID NO: 279085 - DNA, 20 bp, synthetic construct
  source 1..20: mol_type = other DNA
gctacagcctcataaaccta

SEQ ID NO: 279086 - DNA, 20 bp, synthetic construct
  source 1..20: mol_type = other DNA
ggctacagcctcataaacct

SEQ ID NO: 279087 - DNA, 20 bp, synthetic construct
  source 1..20: mol_type = other DNA
aggctacagcctcataaacc

SEQ ID NO: 279088 - DNA, 20 bp, synthetic construct
  source 1..20: mol_type = other DNA
aaggctacagcctcataaac

SEQ ID NO: 279089 - DNA, 20 bp, synthetic construct
  source 1..20: mol_type = other DNA
caaggctacagcctcataaa

SEQ ID NO: 279090 - DNA, 20 bp, synthetic construct
  source 1..20: mol_type = other DNA
tcaaggctacagcctcataa

SEQ ID NO: 279091 - DNA, 20 bp, synthetic construct
  source 1..20: mol_type = other DNA
ctcaaggctacagcctcata

SEQ ID NO: 279092 - DNA, 20 bp, synthetic construct
  source 1..20: mol_type = other DNA
cctcaaggctacagcctcat

SEQ ID NO: 279093 - DNA, 20 bp, synthetic construct
  source 1..20: mol_type = other DNA
tcctcaaggctacagcctca

SEQ ID NO: 279094 - DNA, 20 bp, synthetic construct
  source 1..20: mol_type = other DNA
gtcctcaaggctacagcctc

SEQ ID NO: 279095 - DNA, 20 bp, synthetic construct
  source 1..20: mol_type = other DNA
tgtcctcaaggctacagcct

SEQ ID NO: 279096 - DNA, 20 bp, synthetic construct
  source 1..20: mol_type = other DNA
ctgtcctcaaggctacagcc

SEQ ID NO: 279097 - DNA, 20 bp, synthetic construct
  source 1..20: mol_type = other DNA
gctgtcctcaaggctacagc

SEQ ID NO: 279098 - DNA, 20 bp, synthetic construct
  source 1..20: mol_type = other DNA
ggctgtcctcaaggctacag

SEQ ID NO: 279099 - DNA, 20 bp, synthetic construct
  source 1..20: mol_type = other DNA
gggctgtcctcaaggctaca

SEQ ID NO: 279100 - DNA, 20 bp, synthetic construct
  source 1..20: mol_type = other DNA
tgggctgtcctcaaggctac

SEQ ID NO: 279101 - DNA, 20 bp, synthetic construct
  source 1..20: mol_type = other DNA
ctgggctgtcctcaaggcta

SEQ ID NO: 279102 - DNA, 20 bp, synthetic construct
  source 1..20: mol_type = other DNA
cctgggctgtcctcaaggct

SEQ ID NO: 279103 - DNA, 20 bp, synthetic construct
  source 1..20: mol_type = other DNA
tcctgggctgtcctcaaggc

SEQ ID NO: 279104 - DNA, 20 bp, synthetic construct
  source 1..20: mol_type = other DNA
gtcctgggctgtcctcaagg

SEQ ID NO: 279105 - DNA, 20 bp, synthetic construct
  source 1..20: mol_type = other DNA
tgtcctgggctgtcctcaag

SEQ ID NO: 279106 - DNA, 20 bp, synthetic construct
  source 1..20: mol_type = other DNA
ttgtcctgggctgtcctcaa

SEQ ID NO: 279107 - DNA, 20 bp, synthetic construct
  source 1..20: mol_type = other DNA
gttgtcctgggctgtcctca

SEQ ID NO: 279108 - DNA, 20 bp, synthetic construct
  source 1..20: mol_type = other DNA
agttgtcctgggctgtcctc

SEQ ID NO: 279109 - DNA, 20 bp, synthetic construct
  source 1..20: mol_type = other DNA
aagttgtcctgggctgtcct

SEQ ID NO: 279110 - DNA, 20 bp, synthetic construct
  source 1..20: mol_type = other DNA
aaagttgtcctgggctgtcc

SEQ ID NO: 279111 - DNA, 20 bp, synthetic construct
  source 1..20: mol_type = other DNA
caaagttgtcctgggctgtc

SEQ ID NO: 279112 - DNA, 20 bp, synthetic construct
  source 1..20: mol_type = other DNA
acaaagttgtcctgggctgt

SEQ ID NO: 279113 - DNA, 20 bp, synthetic construct
  source 1..20: mol_type = other DNA
aacaaagttgtcctgggctg

SEQ ID NO: 279114 - DNA, 20 bp, synthetic construct
  source 1..20: mol_type = other DNA
caacaaagttgtcctgggct

SEQ ID NO: 279115 - DNA, 20 bp, synthetic construct
  source 1..20: mol_type = other DNA
acaacaaagttgtcctgggc

SEQ ID NO: 279116 - DNA, 20 bp, synthetic construct
  source 1..20: mol_type = other DNA
gacaacaaagttgtcctggg

SEQ ID NO: 279117 - DNA, 20 bp, synthetic construct
  source 1..20: mol_type = other DNA
tgacaacaaagttgtcctgg

SEQ ID NO: 279118 - DNA, 20 bp, synthetic construct
  source 1..20: mol_type = other DNA
gtgacaacaaagttgtcctg

SEQ ID NO: 279119 - DNA, 20 bp, synthetic construct
  source 1..20: mol_type = other DNA
tgtgacaacaaagttgtcct

SEQ ID NO: 279120 - DNA, 20 bp, synthetic construct
  source 1..20: mol_type = other DNA
atgtgacaacaaagttgtcc

SEQ ID NO: 279121 - DNA, 20 bp, synthetic construct
  source 1..20: mol_type = other DNA
tatgtgacaacaaagttgtc

SEQ ID NO: 279122 - DNA, 20 bp, synthetic construct
  source 1..20: mol_type = other DNA
ctatgtgacaacaaagttgt

SEQ ID NO: 279123 - DNA, 20 bp, synthetic construct
  source 1..20: mol_type = other DNA
tctatgtgacaacaaagttg

SEQ ID NO: 279124 - DNA, 20 bp, synthetic construct
  source 1..20: mol_type = other DNA
atctatgtgacaacaaagtt

SEQ ID NO: 279125 - DNA, 20 bp, synthetic construct
  source 1..20: mol_type = other DNA
tatctatgtgacaacaaagt

SEQ ID NO: 279126 - DNA, 20 bp, synthetic construct
  source 1..20: mol_type = other DNA
ctatctatgtgacaacaaag

SEQ ID NO: 279127 - DNA, 20 bp, synthetic construct
  source 1..20: mol_type = other DNA
gctatctatgtgacaacaaa

SEQ ID NO: 279128 - DNA, 20 bp, synthetic construct
  source 1..20: mol_type = other DNA
ggctatctatgtgacaacaa

SEQ ID NO: 279129 - DNA, 20 bp, synthetic construct
  source 1..20: mol_type = other DNA
aggctatctatgtgacaaca

SEQ ID NO: 279130 - DNA, 20 bp, synthetic construct
  source 1..20: mol_type = other DNA
caggctatctatgtgacaac

SEQ ID NO: 279131 - DNA, 20 bp, synthetic construct
  source 1..20: mol_type = other DNA
acaggctatctatgtgacaa

SEQ ID NO: 279132 - DNA, 20 bp, synthetic construct
  source 1..20: mol_type = other DNA
cacaggctatctatgtgaca

SEQ ID NO: 279133 - DNA, 20 bp, synthetic construct
  source 1..20: mol_type = other DNA
ccacaggctatctatgtgac

SEQ ID NO: 279134 - DNA, 20 bp, synthetic construct
  source 1..20: mol_type = other DNA
gccacaggctatctatgtga

SEQ ID NO: 279135 - DNA, 20 bp, synthetic construct
  source 1..20: mol_type = other DNA
agccacaggctatctatgtg

SEQ ID NO: 279136 - DNA, 20 bp, synthetic construct
  source 1..20: mol_type = other DNA
tagccacaggctatctatgt

SEQ ID NO: 279137 - DNA, 20 bp, synthetic construct
  source 1..20: mol_type = other DNA
gtagccacaggctatctatg

SEQ ID NO: 279138 - DNA, 20 bp, synthetic construct
  source 1..20: mol_type = other DNA
tgtagccacaggctatctat

SEQ ID NO: 279139 - DNA, 20 bp, synthetic construct
  source 1..20: mol_type = other DNA
ttgtagccacaggctatcta

SEQ ID NO: 279140 - DNA, 20 bp, synthetic construct
  source 1..20: mol_type = other DNA
tttgtagccacaggctatct

SEQ ID NO: 279141 - DNA, 20 bp, synthetic construct
  source 1..20: mol_type = other DNA
gtttgtagccacaggctatc

SEQ ID NO: 279142 - DNA, 20 bp, synthetic construct
  source 1..20: mol_type = other DNA
agtttgtagccacaggctat

SEQ ID NO: 279143 - DNA, 20 bp, synthetic construct
  source 1..20: mol_type = other DNA
gagtttgtagccacaggcta

SEQ ID NO: 279144 - DNA, 20 bp, synthetic construct
  source 1..20: mol_type = other DNA
agagtttgtagccacaggct

SEQ ID NO: 279145 - DNA, 20 bp, synthetic construct
  source 1..20: mol_type = other DNA
cagagtttgtagccacaggc

SEQ ID NO: 279146 - DNA, 20 bp, synthetic construct
  source 1..20: mol_type = other DNA
tcagagtttgtagccacagg

SEQ ID NO: 279147 - DNA, 20 bp, synthetic construct
  source 1..20: mol_type = other DNA
ctcagagtttgtagccacag

SEQ ID NO: 279148 - DNA, 20 bp, synthetic construct
  source 1..20: mol_type = other DNA
tctcagagtttgtagccaca

SEQ ID NO: 279149 - DNA, 20 bp, synthetic construct
  source 1..20: mol_type = other DNA
atctcagagtttgtagccac

SEQ ID NO: 279150 - DNA, 20 bp, synthetic construct
  source 1..20: mol_type = other DNA
gatctcagagtttgtagcca

SEQ ID NO: 279151 - DNA, 20 bp, synthetic construct
  source 1..20: mol_type = other DNA
agatctcagagtttgtagcc

SEQ ID NO: 279152 - DNA, 20 bp, synthetic construct
  source 1..20: mol_type = other DNA
tagatctcagagtttgtagc

SEQ ID NO: 279153 - DNA, 20 bp, synthetic construct
  source 1..20: mol_type = other DNA
ctagatctcagagtttgtag

SEQ ID NO: 279154 - DNA, 20 bp, synthetic construct
  source 1..20: mol_type = other DNA
tctagatctcagagtttgta

SEQ ID NO: 279155 - DNA, 20 bp, synthetic construct
  source 1..20: mol_type = other DNA
atctagatctcagagtttgt

SEQ ID NO: 279156 - DNA, 20 bp, synthetic construct
  source 1..20: mol_type = other DNA
aatctagatctcagagtttg

SEQ ID NO: 279157 - DNA, 20 bp, synthetic construct
  source 1..20: mol_type = other DNA
gaatctagatctcagagttt

SEQ ID NO: 279158 - DNA, 20 bp, synthetic construct
  source 1..20: mol_type = other DNA
agaatctagatctcagagtt

SEQ ID NO: 279159 - DNA, 20 bp, synthetic construct
  source 1..20: mol_type = other DNA
aagaatctagatctcagagt

SEQ ID NO: 279160 - DNA, 20 bp, synthetic construct
  source 1..20: mol_type = other DNA
gaagaatctagatctcagag

SEQ ID NO: 279161 - DNA, 20 bp, synthetic construct
  source 1..20: mol_type = other DNA
agaagaatctagatctcaga

SEQ ID NO: 279162 - DNA, 20 bp, synthetic construct
  source 1..20: mol_type = other DNA
cagaagaatctagatctcag

SEQ ID NO: 279163 - DNA, 20 bp, synthetic construct
  source 1..20: mol_type = other DNA
acagaagaatctagatctca

SEQ ID NO: 279164 - DNA, 20 bp, synthetic construct
  source 1..20: mol_type = other DNA
cacagaagaatctagatctc

SEQ ID NO: 279165 - DNA, 20 bp, synthetic construct
  source 1..20: mol_type = other DNA
ccacagaagaatctagatct

SEQ ID NO: 279166 - DNA, 20 bp, synthetic construct
  source 1..20: mol_type = other DNA
gccacagaagaatctagatc

SEQ ID NO: 279167 - DNA, 20 bp, synthetic construct
  source 1..20: mol_type = other DNA
agccacagaagaatctagat

SEQ ID NO: 279168 - DNA, 20 bp, synthetic construct
  source 1..20: mol_type = other DNA
cagccacagaagaatctaga

SEQ ID NO: 279169 - DNA, 20 bp, synthetic construct
  source 1..20: mol_type = other DNA
gcagccacagaagaatctag

SEQ ID NO: 279170 - DNA, 20 bp, synthetic construct
  source 1..20: mol_type = other DNA
agcagccacagaagaatcta

SEQ ID NO: 279171 - DNA, 20 bp, synthetic construct
  source 1..20: mol_type = other DNA
aagcagccacagaagaatct

SEQ ID NO: 279172 - DNA, 20 bp, synthetic construct
  source 1..20: mol_type = other DNA
gaagcagccacagaagaatc

SEQ ID NO: 279173 - DNA, 20 bp, synthetic construct
  source 1..20: mol_type = other DNA
agaagcagccacagaagaat

SEQ ID NO: 279174 - DNA, 20 bp, synthetic construct
  source 1..20: mol_type = other DNA
cagaagcagccacagaagaa

SEQ ID NO: 279175 - DNA, 20 bp, synthetic construct
  source 1..20: mol_type = other DNA
tcagaagcagccacagaaga

SEQ ID NO: 279176 - DNA, 20 bp, synthetic construct
  source 1..20: mol_type = other DNA
gtcagaagcagccacagaag

SEQ ID NO: 279177 - DNA, 20 bp, synthetic construct
  source 1..20: mol_type = other DNA
ggtcagaagcagccacagaa

SEQ ID NO: 279178 - DNA, 20 bp, synthetic construct
  source 1..20: mol_type = other DNA
aggtcagaagcagccacaga

SEQ ID NO: 279179 - DNA, 20 bp, synthetic construct
  source 1..20: mol_type = other DNA
caggtcagaagcagccacag

SEQ ID NO: 279180 - DNA, 20 bp, synthetic construct
  source 1..20: mol_type = other DNA
tcaggtcagaagcagccaca

SEQ ID NO: 279181 - DNA, 20 bp, synthetic construct
  source 1..20: mol_type = other DNA
ctcaggtcagaagcagccac

SEQ ID NO: 279182 - DNA, 20 bp, synthetic construct
  source 1..20: mol_type = other DNA
tctcaggtcagaagcagcca

SEQ ID NO: 279183 - DNA, 20 bp, synthetic construct
  source 1..20: mol_type = other DNA
ttctcaggtcagaagcagcc

SEQ ID NO: 279184 - DNA, 20 bp, synthetic construct
  source 1..20: mol_type = other DNA
tttctcaggtcagaagcagc

SEQ ID NO: 279185 - DNA, 20 bp, synthetic construct
  source 1..20: mol_type = other DNA
ctttctcaggtcagaagcag

SEQ ID NO: 279186 - DNA, 20 bp, synthetic construct
  source 1..20: mol_type = other DNA
actttctcaggtcagaagca

SEQ ID NO: 279187 - DNA, 20 bp, synthetic construct
  source 1..20: mol_type = other DNA
aactttctcaggtcagaagc

SEQ ID NO: 279188 - DNA, 20 bp, synthetic construct
  source 1..20: mol_type = other DNA
caactttctcaggtcagaag

SEQ ID NO: 279189 - DNA, 20 bp, synthetic construct
  source 1..20: mol_type = other DNA
gcaactttctcaggtcagaa

SEQ ID NO: 279190 - DNA, 20 bp, synthetic construct
  source 1..20: mol_type = other DNA
cgcaactttctcaggtcaga

SEQ ID NO: 279191 - DNA, 20 bp, synthetic construct
  source 1..20: mol_type = other DNA
ccgcaactttctcaggtcag

SEQ ID NO: 279192 - DNA, 20 bp, synthetic construct
  source 1..20: mol_type = other DNA
tccgcaactttctcaggtca

SEQ ID NO: 279193 - DNA, 20 bp, synthetic construct
  source 1..20: mol_type = other DNA
ttccgcaactttctcaggtc

SEQ ID NO: 279194 - DNA, 20 bp, synthetic construct
  source 1..20: mol_type = other DNA
gttccgcaactttctcaggt

SEQ ID NO: 279195 - DNA, 20 bp, synthetic construct
  source 1..20: mol_type = other DNA
ggttccgcaactttctcagg

SEQ ID NO: 279196 - DNA, 20 bp, synthetic construct
  source 1..20: mol_type = other DNA
aggttccgcaactttctcag

SEQ ID NO: 279197 - DNA, 20 bp, synthetic construct
  source 1..20: mol_type = other DNA
gaggttccgcaactttctca

SEQ ID NO: 279198 - DNA, 20 bp, synthetic construct
  source 1..20: mol_type = other DNA
tgaggttccgcaactttctc

SEQ ID NO: 279199 - DNA, 20 bp, synthetic construct
  source 1..20: mol_type = other DNA
ctgaggttccgcaactttct

SEQ ID NO: 279200 - DNA, 20 bp, synthetic construct
  source 1..20: mol_type = other DNA
gctgaggttccgcaactttc

SEQ ID NO: 279201 - DNA, 20 bp, synthetic construct
  source 1..20: mol_type = other DNA
cgctgaggttccgcaacttt

SEQ ID NO: 279202 - DNA, 20 bp, synthetic construct
  source 1..20: mol_type = other DNA
tcgctgaggttccgcaactt

SEQ ID NO: 279203 - DNA, 20 bp, synthetic construct
  source 1..20: mol_type = other DNA
ctcgctgaggttccgcaact

SEQ ID NO: 279204 - DNA, 20 bp, synthetic construct
  source 1..20: mol_type = other DNA
gctcgctgaggttccgcaac

SEQ ID NO: 279205 - DNA, 20 bp, synthetic construct
  source 1..20: mol_type = other DNA
ggctcgctgaggttccgcaa

SEQ ID NO: 279206 - DNA, 20 bp, synthetic construct
  source 1..20: mol_type = other DNA
aggctcgctgaggttccgca

SEQ ID NO: 279207 - DNA, 20 bp, synthetic construct
  source 1..20: mol_type = other DNA
gaggctcgctgaggttccgc

SEQ ID NO: 279208 - DNA, 20 bp, synthetic construct
  source 1..20: mol_type = other DNA
tgaggctcgctgaggttccg

SEQ ID NO: 279209 - DNA, 20 bp, synthetic construct
  source 1..20: mol_type = other DNA
gtgaggctcgctgaggttcc

SEQ ID NO: 279210 - DNA, 20 bp, synthetic construct
  source 1..20: mol_type = other DNA
tgtgaggctcgctgaggttc

SEQ ID NO: 279211 - DNA, 20 bp, synthetic construct
  source 1..20: mol_type = other DNA
atgtgaggctcgctgaggtt

SEQ ID NO: 279212 - DNA, 20 bp, synthetic construct
  source 1..20: mol_type = other DNA
catgtgaggctcgctgaggt

SEQ ID NO: 279213 - DNA, 20 bp, synthetic construct
  source 1..20: mol_type = other DNA
ccatgtgaggctcgctgagg

SEQ ID NO: 279214 - DNA, 20 bp, synthetic construct
  source 1..20: mol_type = other DNA
gccatgtgaggctcgctgag

SEQ ID NO: 279215 - DNA, 20 bp, synthetic construct
  source 1..20: mol_type = other DNA
ggccatgtgaggctcgctga

SEQ ID NO: 279216 - DNA, 20 bp, synthetic construct
  source 1..20: mol_type = other DNA
aggccatgtgaggctcgctg

SEQ ID NO: 279217 - DNA, 20 bp, synthetic construct
  source 1..20: mol_type = other DNA
gaggccatgtgaggctcgct

SEQ ID NO: 279218 - DNA, 20 bp, synthetic construct
  source 1..20: mol_type = other DNA
ggaggccatgtgaggctcgc

SEQ ID NO: 279219 - DNA, 20 bp, synthetic construct
  source 1..20: mol_type = other DNA
aggaggccatgtgaggctcg

SEQ ID NO: 279220 - DNA, 20 bp, synthetic construct
  source 1..20: mol_type = other DNA
aaggaggccatgtgaggctc

SEQ ID NO: 279221 - DNA, 20 bp, synthetic construct
  source 1..20: mol_type = other DNA
caaggaggccatgtgaggct

SEQ ID NO: 279222 - DNA, 20 bp, synthetic construct
  source 1..20: mol_type = other DNA
acaaggaggccatgtgaggc

SEQ ID NO: 279223 - DNA, 20 bp, synthetic construct
  source 1..20: mol_type = other DNA
gacaaggaggccatgtgagg

SEQ ID NO: 279224 - DNA, 20 bp, synthetic construct
  source 1..20: mol_type = other DNA
ggacaaggaggccatgtgag

SEQ ID NO: 279225 - DNA, 20 bp, synthetic construct
  source 1..20: mol_type = other DNA
aggacaaggaggccatgtga

SEQ ID NO: 279226 - DNA, 20 bp, synthetic construct
  source 1..20: mol_type = other DNA
aaggacaaggaggccatgtg

SEQ ID NO: 279227 - DNA, 20 bp, synthetic construct
  source 1..20: mol_type = other DNA
taaggacaaggaggccatgt

SEQ ID NO: 279228 - DNA, 20 bp, synthetic construct
  source 1..20: mol_type = other DNA
ttaaggacaaggaggccatg

SEQ ID NO: 279229 - DNA, 20 bp, synthetic construct
  source 1..20: mol_type = other DNA
gttaaggacaaggaggccat

SEQ ID NO: 279230 - DNA, 20 bp, synthetic construct
  source 1..20: mol_type = other DNA
cgttaaggacaaggaggcca

SEQ ID NO: 279231 - DNA, 20 bp, synthetic construct
  source 1..20: mol_type = other DNA
acgttaaggacaaggaggcc

SEQ ID NO: 279232 - DNA, 20 bp, synthetic construct
  source 1..20: mol_type = other DNA
cacgttaaggacaaggaggc

SEQ ID NO: 279233 - DNA, 20 bp, synthetic construct
  source 1..20: mol_type = other DNA
ccacgttaaggacaaggagg

SEQ ID NO: 279234 - DNA, 20 bp, synthetic construct
  source 1..20: mol_type = other DNA
cccacgttaaggacaaggag

SEQ ID NO: 279235 - DNA, 20 bp, synthetic construct
  source 1..20: mol_type = other DNA
ccccacgttaaggacaagga

SEQ ID NO: 279236 - DNA, 20 bp, synthetic construct
  source 1..20: mol_type = other DNA
tccccacgttaaggacaagg

SEQ ID NO: 279237 - DNA, 20 bp, synthetic construct
  source 1..20: mol_type = other DNA
gtccccacgttaaggacaag

SEQ ID NO: 279238 - DNA, 20 bp, synthetic construct
  source 1..20: mol_type = other DNA
cgtccccacgttaaggacaa

SEQ ID NO: 279239 - DNA, 20 bp, synthetic construct
  source 1..20: mol_type = other DNA
ccgtccccacgttaaggaca

SEQ ID NO: 279240 - DNA, 20 bp, synthetic construct
  source 1..20: mol_type = other DNA
accgtccccacgttaaggac

SEQ ID NO: 279241 - DNA, 20 bp, synthetic construct
  source 1..20: mol_type = other DNA
caccgtccccacgttaagga

SEQ ID NO: 279242 - DNA, 20 bp, synthetic construct
  source 1..20: mol_type = other DNA
ccaccgtccccacgttaagg

SEQ ID NO: 279243 - DNA, 20 bp, synthetic construct
  source 1..20: mol_type = other DNA
cccaccgtccccacgttaag

SEQ ID NO: 279244 - DNA, 20 bp, synthetic construct
  source 1..20: mol_type = other DNA
gcccaccgtccccacgttaa

SEQ ID NO: 279245 - DNA, 20 bp, synthetic construct
  source 1..20: mol_type = other DNA
tgcccaccgtccccacgtta

SEQ ID NO: 279246 - DNA, 20 bp, synthetic construct
  source 1..20: mol_type = other DNA
ttgcccaccgtccccacgtt

SEQ ID NO: 279247 - DNA, 20 bp, synthetic construct
  source 1..20: mol_type = other DNA
cttgcccaccgtccccacgt

SEQ ID NO: 279248 - DNA, 20 bp, synthetic construct
  source 1..20: mol_type = other DNA
tcttgcccaccgtccccacg

SEQ ID NO: 279249 - DNA, 20 bp, synthetic construct
  source 1..20: mol_type = other DNA
ttcttgcccaccgtccccac

SEQ ID NO: 279250 - DNA, 20 bp, synthetic construct
  source 1..20: mol_type = other DNA
tttcttgcccaccgtcccca

SEQ ID NO: 279251 - DNA, 20 bp, synthetic construct
  source 1..20: mol_type = other DNA
ctttcttgcccaccgtcccc

SEQ ID NO: 279252 - DNA, 20 bp, synthetic construct
  source 1..20: mol_type = other DNA
cctttcttgcccaccgtccc

SEQ ID NO: 279253 - DNA, 20 bp, synthetic construct
  source 1..20: mol_type = other DNA
acctttcttgcccaccgtcc

SEQ ID NO: 279254 - DNA, 20 bp, synthetic construct
  source 1..20: mol_type = other DNA
cacctttcttgcccaccgtc

SEQ ID NO: 279255 - DNA, 20 bp, synthetic construct
  source 1..20: mol_type = other DNA
tcacctttcttgcccaccgt

SEQ ID NO: 279256 - DNA, 20 bp, synthetic construct
  source 1..20: mol_type = other DNA
atcacctttcttgcccaccg

SEQ ID NO: 279257 - DNA, 20 bp, synthetic construct
  source 1..20: mol_type = other DNA
catcacctttcttgcccacc

SEQ ID NO: 279258 - DNA, 20 bp, synthetic construct
  source 1..20: mol_type = other DNA
acatcacctttcttgcccac

SEQ ID NO: 279259 - DNA, 20 bp, synthetic construct
  source 1..20: mol_type = other DNA
cacatcacctttcttgccca

SEQ ID NO: 279260 - DNA, 20 bp, synthetic construct
  source 1..20: mol_type = other DNA
ccacatcacctttcttgccc

SEQ ID NO: 279261 - DNA, 20 bp, synthetic construct
  source 1..20: mol_type = other DNA
gccacatcacctttcttgcc

SEQ ID NO: 279262 - DNA, 20 bp, synthetic construct
  source 1..20: mol_type = other DNA
tgccacatcacctttcttgc

SEQ ID NO: 279263 - DNA, 20 bp, synthetic construct
  source 1..20: mol_type = other DNA
gtgccacatcacctttcttg

SEQ ID NO: 279264 - DNA, 20 bp, synthetic construct
  source 1..20: mol_type = other DNA
agtgccacatcacctttctt

SEQ ID NO: 279265 - DNA, 20 bp, synthetic construct
  source 1..20: mol_type = other DNA
tagtgccacatcacctttct

SEQ ID NO: 279266 - DNA, 20 bp, synthetic construct
  source 1..20: mol_type = other DNA
ctagtgccacatcacctttc

SEQ ID NO: 279267 - DNA, 20 bp, synthetic construct
  source 1..20: mol_type = other DNA
tctagtgccacatcaccttt

SEQ ID NO: 279268 - DNA, 20 bp, synthetic construct
  source 1..20: mol_type = other DNA
ctctagtgccacatcacctt

SEQ ID NO: 279269 - DNA, 20 bp, synthetic construct
  source 1..20: mol_type = other DNA
tctctagtgccacatcacct

SEQ ID NO: 279270 - DNA, 20 bp, synthetic construct
  source 1..20: mol_type = other DNA
atctctagtgccacatcacc

SEQ ID NO: 279271 - DNA, 20 bp, synthetic construct
  source 1..20: mol_type = other DNA
aatctctagtgccacatcac

SEQ ID NO: 279272 - DNA, 20 bp, synthetic construct
  source 1..20: mol_type = other DNA
aaatctctagtgccacatca

SEQ ID NO: 279273 - DNA, 20 bp, synthetic construct
  source 1..20: mol_type = other DNA
taaatctctagtgccacatc

SEQ ID NO: 279274 - DNA, 20 bp, synthetic construct
  source 1..20: mol_type = other DNA
ataaatctctagtgccacat

SEQ ID NO: 279275 - DNA, 20 bp, synthetic construct
  source 1..20: mol_type = other DNA
gataaatctctagtgccaca

SEQ ID NO: 279276 - DNA, 20 bp, synthetic construct
  source 1..20: mol_type = other DNA
ggataaatctctagtgccac

SEQ ID NO: 279277 - DNA, 20 bp, synthetic construct
  source 1..20: mol_type = other DNA
tggataaatctctagtgcca

SEQ ID NO: 279278 - DNA, 20 bp, synthetic construct
  source 1..20: mol_type = other DNA
atggataaatctctagtgcc

SEQ ID NO: 279279 - DNA, 20 bp, synthetic construct
  source 1..20: mol_type = other DNA
gatggataaatctctagtgc

SEQ ID NO: 279280 - DNA, 20 bp, synthetic construct
  source 1..20: mol_type = other DNA
agatggataaatctctagtg

SEQ ID NO: 279281 - DNA, 20 bp, synthetic construct
  source 1..20: mol_type = other DNA
gagatggataaatctctagt

SEQ ID NO: 279282 - DNA, 20 bp, synthetic construct
  source 1..20: mol_type = other DNA
agagatggataaatctctag

SEQ ID NO: 279283 - DNA, 20 bp, synthetic construct
  source 1..20: mol_type = other DNA
tagagatggataaatctcta

SEQ ID NO: 279284 - DNA, 20 bp, synthetic construct
  source 1..20: mol_type = other DNA
ttagagatggataaatctct

SEQ ID NO: 279285 - DNA, 20 bp, synthetic construct
  source 1..20: mol_type = other DNA
tttagagatggataaatctc

SEQ ID NO: 279286 - DNA, 20 bp, synthetic construct
  source 1..20: mol_type = other DNA
ctttagagatggataaatct

SEQ ID NO: 279287 - DNA, 20 bp, synthetic construct
  source 1..20: mol_type = other DNA
cctttagagatggataaatc

SEQ ID NO: 279288 - DNA, 20 bp, synthetic construct
  source 1..20: mol_type = other DNA
tcctttagagatggataaat

SEQ ID NO: 279289 - DNA, 20 bp, synthetic construct
  source 1..20: mol_type = other DNA
ctcctttagagatggataaa

SEQ ID NO: 279290 - DNA, 20 bp, synthetic construct
  source 1..20: mol_type = other DNA
cctcctttagagatggataa

SEQ ID NO: 279291 - DNA, 20 bp, synthetic construct
  source 1..20: mol_type = other DNA
tcctcctttagagatggata

SEQ ID NO: 279292 - DNA, 20 bp, synthetic construct
  source 1..20: mol_type = other DNA
ctcctcctttagagatggat

SEQ ID NO: 279293 - DNA, 20 bp, synthetic construct
  source 1..20: mol_type = other DNA
actcctcctttagagatgga

SEQ ID NO: 279294 - DNA, 20 bp, synthetic construct
  source 1..20: mol_type = other DNA
cactcctcctttagagatgg

SEQ ID NO: 279295 - DNA, 20 bp, synthetic construct
  source 1..20: mol_type = other DNA
ccactcctcctttagagatg

SEQ ID NO: 279296 - DNA, 20 bp, synthetic construct
  source 1..20: mol_type = other DNA
tccactcctcctttagagat

SEQ ID NO: 279297 - DNA, 20 bp, synthetic construct
  source 1..20: mol_type = other DNA
atccactcctcctttagaga

SEQ ID NO: 279298 - DNA, 20 bp, synthetic construct
  source 1..20: mol_type = other DNA
aatccactcctcctttagag

SEQ ID NO: 279299 - DNA, 20 bp, synthetic construct
  source 1..20: mol_type = other DNA
caatccactcctcctttaga

SEQ ID NO: 279300 - DNA, 20 bp, synthetic construct
  source 1..20: mol_type = other DNA
acaatccactcctcctttag

SEQ ID NO: 279301 - DNA, 20 bp, synthetic construct
  source 1..20: mol_type = other DNA
tacaatccactcctccttta

SEQ ID NO: 279302 - DNA, 20 bp, synthetic construct
  source 1..20: mol_type = other DNA
gtacaatccactcctccttt

SEQ ID NO: 279303 - DNA, 20 bp, synthetic construct
  source 1..20: mol_type = other DNA
tgtacaatccactcctcctt

SEQ ID NO: 279304 - DNA, 20 bp, synthetic construct
  source 1..20: mol_type = other DNA
atgtacaatccactcctcct

SEQ ID NO: 279305 - DNA, 20 bp, synthetic construct
  source 1..20: mol_type = other DNA
aatgtacaatccactcctcc

SEQ ID NO: 279306 - DNA, 20 bp, synthetic construct
  source 1..20: mol_type = other DNA
caatgtacaatccactcctc

SEQ ID NO: 279307 - DNA, 20 bp, synthetic construct
  source 1..20: mol_type = other DNA
tcaatgtacaatccactcct

SEQ ID NO: 279308 - DNA, 20 bp, synthetic construct
  source 1..20: mol_type = other DNA
ttcaatgtacaatccactcc

SEQ ID NO: 279309 - DNA, 20 bp, synthetic construct
  source 1..20: mol_type = other DNA
tttcaatgtacaatccactc

SEQ ID NO: 279310 - DNA, 20 bp, synthetic construct
  source 1..20: mol_type = other DNA
gtttcaatgtacaatccact

SEQ ID NO: 279311 - DNA, 20 bp, synthetic construct
  source 1..20: mol_type = other DNA
tgtttcaatgtacaatccac

SEQ ID NO: 279312 - DNA, 20 bp, synthetic construct
  source 1..20: mol_type = other DNA
gtgtttcaatgtacaatcca

SEQ ID NO: 279313 - DNA, 20 bp, synthetic construct
  source 1..20: mol_type = other DNA
ggtgtttcaatgtacaatcc

SEQ ID NO: 279314 - DNA, 20 bp, synthetic construct
  source 1..20: mol_type = other DNA
tggtgtttcaatgtacaatc

SEQ ID NO: 279315 - DNA, 20 bp, synthetic construct
  source 1..20: mol_type = other DNA
ctggtgtttcaatgtacaat

SEQ ID NO: 279316 - DNA, 20 bp, synthetic construct
  source 1..20: mol_type = other DNA
tctggtgtttcaatgtacaa

SEQ ID NO: 279317 - DNA, 20 bp, synthetic construct
  source 1..20: mol_type = other DNA
ctctggtgtttcaatgtaca

SEQ ID NO: 279318 - DNA, 20 bp, synthetic construct
  source 1..20: mol_type = other DNA
tctctggtgtttcaatgtac

SEQ ID NO: 279319 - DNA, 20 bp, synthetic construct
  source 1..20: mol_type = other DNA
ttctctggtgtttcaatgta

SEQ ID NO: 279320 - DNA, 20 bp, synthetic construct
  source 1..20: mol_type = other DNA
cttctctggtgtttcaatgt

SEQ ID NO: 279321 - DNA, 20 bp, synthetic construct
  source 1..20: mol_type = other DNA
ccttctctggtgtttcaatg

SEQ ID NO: 279322 - DNA, 20 bp, synthetic construct
  source 1..20: mol_type = other DNA
tccttctctggtgtttcaat

SEQ ID NO: 279323 - DNA, 20 bp, synthetic construct
  source 1..20: mol_type = other DNA
ttccttctctggtgtttcaa

SEQ ID NO: 279324 - DNA, 20 bp, synthetic construct
  source 1..20: mol_type = other DNA
attccttctctggtgtttca

SEQ ID NO: 279325 - DNA, 20 bp, synthetic construct
  source 1..20: mol_type = other DNA
aattccttctctggtgtttc

SEQ ID NO: 279326 - DNA, 20 bp, synthetic construct
  source 1..20: mol_type = other DNA
taattccttctctggtgttt

SEQ ID NO: 279327 - DNA, 20 bp, synthetic construct
  source 1..20: mol_type = other DNA
gtaattccttctctggtgtt

SEQ ID NO: 279328 - DNA, 20 bp, synthetic construct
  source 1..20: mol_type = other DNA
tgtaattccttctctggtgt

SEQ ID NO: 279329 - DNA, 20 bp, synthetic construct
  source 1..20: mol_type = other DNA
ttgtaattccttctctggtg

SEQ ID NO: 279330 - DNA, 20 bp, synthetic construct
  source 1..20: mol_type = other DNA
tttgtaattccttctctggt

SEQ ID NO: 279331 - DNA, 20 bp, synthetic construct
  source 1..20: mol_type = other DNA
ctttgtaattccttctctgg

SEQ ID NO: 279332 - DNA, 20 bp, synthetic construct
  source 1..20: mol_type = other DNA
cctttgtaattccttctctg

SEQ ID NO: 279333 - DNA, 20 bp, synthetic construct
  source 1..20: mol_type = other DNA
tcctttgtaattccttctct

SEQ ID NO: 279334 - DNA, 20 bp, synthetic construct
  source 1..20: mol_type = other DNA
ttcctttgtaattccttctc

SEQ ID NO: 279335 - DNA, 20 bp, synthetic construct
  source 1..20: mol_type = other DNA
cttcctttgtaattccttct

SEQ ID NO: 279336 - DNA, 20 bp, synthetic construct
  source 1..20: mol_type = other DNA
tcttcctttgtaattccttc

SEQ ID NO: 279337 - DNA, 20 bp, synthetic construct
  source 1..20: mol_type = other DNA
ttcttcctttgtaattcctt

SEQ ID NO: 279338 - DNA, 20 bp, synthetic construct
  source 1..20: mol_type = other DNA
attcttcctttgtaattcct

SEQ ID NO: 279339 - DNA, 20 bp, synthetic construct
  source 1..20: mol_type = other DNA
aattcttcctttgtaattcc

SEQ ID NO: 279340 - DNA, 20 bp, synthetic construct
  source 1..20: mol_type = other DNA
aaattcttcctttgtaattc

SEQ ID NO: 279341 - DNA, 20 bp, synthetic construct
  source 1..20: mol_type = other DNA
caaattcttcctttgtaatt

SEQ ID NO: 279342 - DNA, 20 bp, synthetic construct
  source 1..20: mol_type = other DNA
tcaaattcttcctttgtaat

SEQ ID NO: 279343 - DNA, 20 bp, synthetic construct
  source 1..20: mol_type = other DNA
ctcaaattcttcctttgtaa

SEQ ID NO: 279344 - DNA, 20 bp, synthetic construct
  source 1..20: mol_type = other DNA
actcaaattcttcctttgta

SEQ ID NO: 279345 - DNA, 20 bp, synthetic construct
  source 1..20: mol_type = other DNA
tactcaaattcttcctttgt

SEQ ID NO: 279346 - DNA, 20 bp, synthetic construct
  source 1..20: mol_type = other DNA
atactcaaattcttcctttg

SEQ ID NO: 279347 - DNA, 20 bp, synthetic construct
  source 1..20: mol_type = other DNA
gatactcaaattcttccttt

SEQ ID NO: 279348 - DNA, 20 bp, synthetic construct
  source 1..20: mol_type = other DNA
agatactcaaattcttcctt

SEQ ID NO: 279349 - DNA, 20 bp, synthetic construct
  source 1..20: mol_type = other DNA
tagatactcaaattcttcct

SEQ ID NO: 279350 - DNA, 20 bp, synthetic construct
  source 1..20: mol_type = other DNA
ttagatactcaaattcttcc

SEQ ID NO: 279351 - DNA, 20 bp, synthetic construct
  source 1..20: mol_type = other DNA
tttagatactcaaattcttc

SEQ ID NO: 279352 - DNA, 20 bp, synthetic construct
  source 1..20: mol_type = other DNA
ttttagatactcaaattctt

SEQ ID NO: 279353 - DNA, 20 bp, synthetic construct
  source 1..20: mol_type = other DNA
tttttagatactcaaattct

SEQ ID NO: 279354 - DNA, 20 bp, synthetic construct
  source 1..20: mol_type = other DNA
atttttagatactcaaattc

SEQ ID NO: 279355 - DNA, 20 bp, synthetic construct
  source 1..20: mol_type = other DNA
catttttagatactcaaatt

SEQ ID NO: 279356 - DNA, 20 bp, synthetic construct
  source 1..20: mol_type = other DNA
acatttttagatactcaaat

SEQ ID NO: 279357 - DNA, 20 bp, synthetic construct
  source 1..20: mol_type = other DNA
tacatttttagatactcaaa

SEQ ID NO: 279358 - DNA, 20 bp, synthetic construct
  source 1..20: mol_type = other DNA
ctacatttttagatactcaa

SEQ ID NO: 279359 - DNA, 20 bp, synthetic construct
  source 1..20: mol_type = other DNA
cctacatttttagatactca

SEQ ID NO: 279360 - DNA, 20 bp, synthetic construct
  source 1..20: mol_type = other DNA
acctacatttttagatactc

SEQ ID NO: 279361 - DNA, 20 bp, synthetic construct
  source 1..20: mol_type = other DNA
gacctacatttttagatact

SEQ ID NO: 279362 - DNA, 20 bp, synthetic construct
  source 1..20: mol_type = other DNA
tgacctacatttttagatac

SEQ ID NO: 279363 - DNA, 20 bp, synthetic construct
  source 1..20: mol_type = other DNA
ctgacctacatttttagata

SEQ ID NO: 279364 - DNA, 20 bp, synthetic construct
  source 1..20: mol_type = other DNA
cctgacctacatttttagat

SEQ ID NO: 279365 - DNA, 20 bp, synthetic construct
  source 1..20: mol_type = other DNA
gcctgacctacatttttaga

SEQ ID NO: 279366 - DNA, 20 bp, synthetic construct
  source 1..20: mol_type = other DNA
cgcctgacctacatttttag

SEQ ID NO: 279367 - DNA, 20 bp, synthetic construct
  source 1..20: mol_type = other DNA
gcgcctgacctacattttta

SEQ ID NO: 279368 - DNA, 20 bp, synthetic construct
  source 1..20: mol_type = other DNA
agcgcctgacctacattttt

SEQ ID NO: 279369 - DNA, 20 bp, synthetic construct
  source 1..20: mol_type = other DNA
gagcgcctgacctacatttt

SEQ ID NO: 279370 - DNA, 20 bp, synthetic construct
  source 1..20: mol_type = other DNA
ggagcgcctgacctacattt

SEQ ID NO: 279371 - DNA, 20 bp, synthetic construct
  source 1..20: mol_type = other DNA
aggagcgcctgacctacatt

SEQ ID NO: 279372 - DNA, 20 bp, synthetic construct
  source 1..20: mol_type = other DNA
caggagcgcctgacctacat

SEQ ID NO: 279373 - DNA, 20 bp, synthetic construct
  source 1..20: mol_type = other DNA
acaggagcgcctgacctaca

SEQ ID NO: 279374 - DNA, 20 bp, synthetic construct
  source 1..20: mol_type = other DNA
cacaggagcgcctgacctac

SEQ ID NO: 279375 - DNA, 20 bp, synthetic construct
  source 1..20: mol_type = other DNA
acacaggagcgcctgaccta

SEQ ID NO: 279376 - DNA, 20 bp, synthetic construct
  source 1..20: mol_type = other DNA
aacacaggagcgcctgacct

SEQ ID NO: 279377 - DNA, 20 bp, synthetic construct
  source 1..20: mol_type = other DNA
caacacaggagcgcctgacc

SEQ ID NO: 279378 - DNA, 20 bp, synthetic construct
  source 1..20: mol_type = other DNA
tcaacacaggagcgcctgac

SEQ ID NO: 279379 - DNA, 20 bp, synthetic construct
  source 1..20: mol_type = other DNA
atcaacacaggagcgcctga

SEQ ID NO: 279380 - DNA, 20 bp, synthetic construct
  source 1..20: mol_type = other DNA
aatcaacacaggagcgcctg

SEQ ID NO: 279381 - DNA, 20 bp, synthetic construct
  source 1..20: mol_type = other DNA
caatcaacacaggagcgcct

SEQ ID NO: 279382 - DNA, 20 bp, synthetic construct
  source 1..20: mol_type = other DNA
gcaatcaacacaggagcgcc

SEQ ID NO: 279383 - DNA, 20 bp, synthetic construct
  source 1..20: mol_type = other DNA
tgcaatcaacacaggagcgc

SEQ ID NO: 279384 - DNA, 20 bp, synthetic construct
  source 1..20: mol_type = other DNA
ctgcaatcaacacaggagcg

SEQ ID NO: 279385 - DNA, 20 bp, synthetic construct
  source 1..20: mol_type = other DNA
cctgcaatcaacacaggagc

SEQ ID NO: 279386 - DNA, 20 bp, synthetic construct
  source 1..20: mol_type = other DNA
ccctgcaatcaacacaggag

SEQ ID NO: 279387 - DNA, 20 bp, synthetic construct
  source 1..20: mol_type = other DNA
gccctgcaatcaacacagga

SEQ ID NO: 279388 - DNA, 20 bp, synthetic construct
  source 1..20: mol_type = other DNA
agccctgcaatcaacacagg

SEQ ID NO: 279389 - DNA, 20 bp, synthetic construct
  source 1..20: mol_type = other DNA
tagccctgcaatcaacacag

SEQ ID NO: 279390 - DNA, 20 bp, synthetic construct
  source 1..20: mol_type = other DNA
atagccctgcaatcaacaca

SEQ ID NO: 279391 - DNA, 20 bp, synthetic construct
  source 1..20: mol_type = other DNA
aatagccctgcaatcaacac

SEQ ID NO: 279392 - DNA, 20 bp, synthetic construct
  source 1..20: mol_type = other DNA
gaatagccctgcaatcaaca

SEQ ID NO: 279393 - DNA, 20 bp, synthetic construct
  source 1..20: mol_type = other DNA
tgaatagccctgcaatcaac

SEQ ID NO: 279394 - DNA, 20 bp, synthetic construct
  source 1..20: mol_type = other DNA
gtgaatagccctgcaatcaa

SEQ ID NO: 279395 - DNA, 20 bp, synthetic construct
  source 1..20: mol_type = other DNA
tgtgaatagccctgcaatca

SEQ ID NO: 279396 - DNA, 20 bp, synthetic construct
  source 1..20: mol_type = other DNA
ttgtgaatagccctgcaatc

SEQ ID NO: 279397 - DNA, 20 bp, synthetic construct
  source 1..20: mol_type = other DNA
attgtgaatagccctgcaat

SEQ ID NO: 279398 - DNA, 20 bp, synthetic construct
  source 1..20: mol_type = other DNA
tattgtgaatagccctgcaa

SEQ ID NO: 279399 - DNA, 20 bp, synthetic construct
  source 1..20: mol_type = other DNA
ctattgtgaatagccctgca

SEQ ID NO: 279400 - DNA, 20 bp, synthetic construct
  source 1..20: mol_type = other DNA
gctattgtgaatagccctgc

SEQ ID NO: 279401 - DNA, 20 bp, synthetic construct
  source 1..20: mol_type = other DNA
ggctattgtgaatagccctg

SEQ ID NO: 279402 - DNA, 20 bp, synthetic construct
  source 1..20: mol_type = other DNA
tggctattgtgaatagccct

SEQ ID NO: 279403 - DNA, 20 bp, synthetic construct
  source 1..20: mol_type = other DNA
ttggctattgtgaatagccc

SEQ ID NO: 279404 - DNA, 20 bp, synthetic construct
  source 1..20: mol_type = other DNA
cttggctattgtgaatagcc

SEQ ID NO: 279405 - DNA, 20 bp, synthetic construct
  source 1..20: mol_type = other DNA
tcttggctattgtgaatagc

SEQ ID NO: 279406 - DNA, 20 bp, synthetic construct
  source 1..20: mol_type = other DNA
atcttggctattgtgaatag

SEQ ID NO: 279407 - DNA, 20 bp, synthetic construct
  source 1..20: mol_type = other DNA
aatcttggctattgtgaata

SEQ ID NO: 279408 - DNA, 20 bp, synthetic construct
  source 1..20: mol_type = other DNA
aaatcttggctattgtgaat

SEQ ID NO: 279409 - DNA, 20 bp, synthetic construct
  source 1..20: mol_type = other DNA
caaatcttggctattgtgaa

SEQ ID NO: 279410 - DNA, 20 bp, synthetic construct
  source 1..20: mol_type = other DNA
ccaaatcttggctattgtga

SEQ ID NO: 279411 - DNA, 20 bp, synthetic construct
  source 1..20: mol_type = other DNA
tccaaatcttggctattgtg

SEQ ID NO: 279412 - DNA, 20 bp, synthetic construct
  source 1..20: mol_type = other DNA
ttccaaatcttggctattgt

SEQ ID NO: 279413 - DNA, 20 bp, synthetic construct
  source 1..20: mol_type = other DNA
cttccaaatcttggctattg

SEQ ID NO: 279414 - DNA, 20 bp, synthetic construct
  source 1..20: mol_type = other DNA
gcttccaaatcttggctatt

SEQ ID NO: 279415 - DNA, 20 bp, synthetic construct
  source 1..20: mol_type = other DNA
tgcttccaaatcttggctat

SEQ ID NO: 279416 - DNA, 20 bp, synthetic construct
  source 1..20: mol_type = other DNA
ttgcttccaaatcttggcta

SEQ ID NO: 279417 - DNA, 20 bp, synthetic construct
  source 1..20: mol_type = other DNA
gttgcttccaaatcttggct

SEQ ID NO: 279418 - DNA, 20 bp, synthetic construct
  source 1..20: mol_type = other DNA
ggttgcttccaaatcttggc

SEQ ID NO: 279419 - DNA, 20 bp, synthetic construct
  source 1..20: mol_type = other DNA
gggttgcttccaaatcttgg

SEQ ID NO: 279420 - DNA, 20 bp, synthetic construct
  source 1..20: mol_type = other DNA
tgggttgcttccaaatcttg

SEQ ID NO: 279421 - DNA, 20 bp, synthetic construct
  source 1..20: mol_type = other DNA
ttgggttgcttccaaatctt

SEQ ID NO: 279422 - DNA, 20 bp, synthetic construct
  source 1..20: mol_type = other DNA
cttgggttgcttccaaatct

SEQ ID NO: 279423 - DNA, 20 bp, synthetic construct
  source 1..20: mol_type = other DNA
acttgggttgcttccaaatc

SEQ ID NO: 279424 - DNA, 20 bp, synthetic construct
  source 1..20: mol_type = other DNA
cacttgggttgcttccaaat

SEQ ID NO: 279425 - DNA, 20 bp, synthetic construct
  source 1..20: mol_type = other DNA
acacttgggttgcttccaaa

SEQ ID NO: 279426 - DNA, 20 bp, synthetic construct
  source 1..20: mol_type = other DNA
gacacttgggttgcttccaa

SEQ ID NO: 279427 - DNA, 20 bp, synthetic construct
  source 1..20: mol_type = other DNA
ggacacttgggttgcttcca

SEQ ID NO: 279428 - DNA, 20 bp, synthetic construct
  source 1..20: mol_type = other DNA
tggacacttgggttgcttcc

SEQ ID NO: 279429 - DNA, 20 bp, synthetic construct
  source 1..20: mol_type = other DNA
atggacacttgggttgcttc

SEQ ID NO: 279430 - DNA, 20 bp, synthetic construct
  source 1..20: mol_type = other DNA
gatggacacttgggttgctt

SEQ ID NO: 279431 - DNA, 20 bp, synthetic construct
  source 1..20: mol_type = other DNA
tgatggacacttgggttgct

SEQ ID NO: 279432 - DNA, 20 bp, synthetic construct
  source 1..20: mol_type = other DNA
ttgatggacacttgggttgc

SEQ ID NO: 279433 - DNA, 20 bp, synthetic construct
  source 1..20: mol_type = other DNA
gttgatggacacttgggttg

SEQ ID NO: 279434 - DNA, 20 bp, synthetic construct
  source 1..20: mol_type = other DNA
tgttgatggacacttgggtt

SEQ ID NO: 279435 - DNA, 20 bp, synthetic construct
  source 1..20: mol_type = other DNA
ctgttgatggacacttgggt

SEQ ID NO: 279436 - DNA, 20 bp, synthetic construct
  source 1..20: mol_type = other DNA
tctgttgatggacacttggg

SEQ ID NO: 279437 - DNA, 20 bp, synthetic construct
  source 1..20: mol_type = other DNA
gtctgttgatggacacttgg

SEQ ID NO: 279438 - DNA, 20 bp, synthetic construct
  source 1..20: mol_type = other DNA
tgtctgttgatggacacttg

SEQ ID NO: 279439 - DNA, 20 bp, synthetic construct
  source 1..20: mol_type = other DNA
ttgtctgttgatggacactt

SEQ ID NO: 279440 - DNA, 20 bp, synthetic construct
  source 1..20: mol_type = other DNA
tttgtctgttgatggacact

SEQ ID NO: 279441 - DNA, 20 bp, synthetic construct
  source 1..20: mol_type = other DNA
atttgtctgttgatggacac

SEQ ID NO: 279442 - DNA, 20 bp, synthetic construct
  source 1..20: mol_type = other DNA
catttgtctgttgatggaca

SEQ ID NO: 279443 - DNA, 20 bp, synthetic construct
  source 1..20: mol_type = other DNA
ccatttgtctgttgatggac

SEQ ID NO: 279444 - DNA, 20 bp, synthetic construct
  source 1..20: mol_type = other DNA
tccatttgtctgttgatgga

SEQ ID NO: 279445 - DNA, 20 bp, synthetic construct
  source 1..20: mol_type = other DNA
atccatttgtctgttgatgg

SEQ ID NO: 279446 - DNA, 20 bp, synthetic construct
  source 1..20: mol_type = other DNA
tatccatttgtctgttgatg

SEQ ID NO: 279447 - DNA, 20 bp, synthetic construct
  source 1..20: mol_type = other DNA
ttatccatttgtctgttgat

SEQ ID NO: 279448 - DNA, 20 bp, synthetic construct
  source 1..20: mol_type = other DNA
tttatccatttgtctgttga

SEQ ID NO: 279449 - DNA, 20 bp, synthetic construct
  source 1..20: mol_type = other DNA
ctttatccatttgtctgttg

SEQ ID NO: 279450 - DNA, 20 bp, synthetic construct
  source 1..20: mol_type = other DNA
tctttatccatttgtctgtt

SEQ ID NO: 279451 - DNA, 20 bp, synthetic construct
  source 1..20: mol_type = other DNA
ttctttatccatttgtctgt

SEQ ID NO: 279452 - DNA, 20 bp, synthetic construct
  source 1..20: mol_type = other DNA
tttctttatccatttgtctg

SEQ ID NO: 279453 - DNA, 20 bp, synthetic construct
  source 1..20: mol_type = other DNA
ttttctttatccatttgtct

SEQ ID NO: 279454 - DNA, 20 bp, synthetic construct
  source 1..20: mol_type = other DNA
attttctttatccatttgtc

SEQ ID NO: 279455 - DNA, 20 bp, synthetic construct
  source 1..20: mol_type = other DNA
cattttctttatccatttgt

SEQ ID NO: 279456 - DNA, 20 bp, synthetic construct
  source 1..20: mol_type = other DNA
acattttctttatccatttg

SEQ ID NO: 279457 - DNA, 20 bp, synthetic construct
  source 1..20: mol_type = other DNA
cacattttctttatccattt

SEQ ID NO: 279458 - DNA, 20 bp, synthetic construct
  source 1..20: mol_type = other DNA
ccacattttctttatccatt

SEQ ID NO: 279459 - DNA, 20 bp, synthetic construct
  source 1..20: mol_type = other DNA
accacattttctttatccat

SEQ ID NO: 279460 - DNA, 20 bp, synthetic construct
  source 1..20: mol_type = other DNA
caccacattttctttatcca

SEQ ID NO: 279461 - DNA, 20 bp, synthetic construct
  source 1..20: mol_type = other DNA
gcaccacattttctttatcc

SEQ ID NO: 279462 - DNA, 20 bp, synthetic construct
  source 1..20: mol_type = other DNA
tgcaccacattttctttatc

SEQ ID NO: 279463 - DNA, 20 bp, synthetic construct
  source 1..20: mol_type = other DNA
atgcaccacattttctttat

SEQ ID NO: 279464 - DNA, 20 bp, synthetic construct
  source 1..20: mol_type = other DNA
tatgcaccacattttcttta

SEQ ID NO: 279465 - DNA, 20 bp, synthetic construct
  source 1..20: mol_type = other DNA
atatgcaccacattttcttt

SEQ ID NO: 279466 - DNA, 20 bp, synthetic construct
  source 1..20: mol_type = other DNA
tatatgcaccacattttctt

SEQ ID NO: 279467 - DNA, 20 bp, synthetic construct
  source 1..20: mol_type = other DNA
gtatatgcaccacattttct

SEQ ID NO: 279468 - DNA, 20 bp, synthetic construct
  source 1..20: mol_type = other DNA
tgtatatgcaccacattttc

SEQ ID NO: 279469 - DNA, 20 bp, synthetic construct
  source 1..20: mol_type = other DNA
gtgtatatgcaccacatttt

SEQ ID NO: 279470 - DNA, 20 bp, synthetic construct
  source 1..20: mol_type = other DNA
tgtgtatatgcaccacattt

SEQ ID NO: 279471 - DNA, 20 bp, synthetic construct
  source 1..20: mol_type = other DNA
ttgtgtatatgcaccacatt

SEQ ID NO: 279472 - DNA, 20 bp, synthetic construct
  source 1..20: mol_type = other DNA
attgtgtatatgcaccacat

SEQ ID NO: 279473 - DNA, 20 bp, synthetic construct
  source 1..20: mol_type = other DNA
cattgtgtatatgcaccaca

SEQ ID NO: 279474 - DNA, 20 bp, synthetic construct
  source 1..20: mol_type = other DNA
ccattgtgtatatgcaccac

SEQ ID NO: 279475 - DNA, 20 bp, synthetic construct
  source 1..20: mol_type = other DNA
tccattgtgtatatgcacca

SEQ ID NO: 279476 - DNA, 20 bp, synthetic construct
  source 1..20: mol_type = other DNA
ttccattgtgtatatgcacc

SEQ ID NO: 279477 - DNA, 20 bp, synthetic construct
  source 1..20: mol_type = other DNA
attccattgtgtatatgcac

SEQ ID NO: 279478 - DNA, 20 bp, synthetic construct
  source 1..20: mol_type = other DNA
tattccattgtgtatatgca

SEQ ID NO: 279479 - DNA, 20 bp, synthetic construct
  source 1..20: mol_type = other DNA
gtattccattgtgtatatgc

SEQ ID NO: 279480 - DNA, 20 bp, synthetic construct
  source 1..20: mol_type = other DNA
agtattccattgtgtatatg

SEQ ID NO: 279481 - DNA, 20 bp, synthetic construct
  source 1..20: mol_type = other DNA
tagtattccattgtgtatat

SEQ ID NO: 279482 - DNA, 20 bp, synthetic construct
  source 1..20: mol_type = other DNA
atagtattccattgtgtata

SEQ ID NO: 279483 - DNA, 20 bp, synthetic construct
  source 1..20: mol_type = other DNA
aatagtattccattgtgtat

SEQ ID NO: 279484 - DNA, 20 bp, synthetic construct
  source 1..20: mol_type = other DNA
gaatagtattccattgtgta

SEQ ID NO: 279485 - DNA, 20 bp, synthetic construct
  source 1..20: mol_type = other DNA
tgaatagtattccattgtgt

SEQ ID NO: 279486 - DNA, 20 bp, synthetic construct
  source 1..20: mol_type = other DNA
ctgaatagtattccattgtg

SEQ ID NO: 279487 - DNA, 20 bp, synthetic construct
  source 1..20: mol_type = other DNA
gctgaatagtattccattgt

SEQ ID NO: 279488 - DNA, 20 bp, synthetic construct
  source 1..20: mol_type = other DNA
ggctgaatagtattccattg

SEQ ID NO: 279489 - DNA, 20 bp, synthetic construct
  source 1..20: mol_type = other DNA
tggctgaatagtattccatt

SEQ ID NO: 279490 - DNA, 20 bp, synthetic construct
  source 1..20: mol_type = other DNA
atggctgaatagtattccat

SEQ ID NO: 279491 - DNA, 20 bp, synthetic construct
  source 1..20: mol_type = other DNA
catggctgaatagtattcca

SEQ ID NO: 279492 - DNA, 20 bp, synthetic construct
  source 1..20: mol_type = other DNA
tcatggctgaatagtattcc

SEQ ID NO: 279493 - DNA, 20 bp, synthetic construct
  source 1..20: mol_type = other DNA
ttcatggctgaatagtattc

SEQ ID NO: 279494 - DNA, 20 bp, synthetic construct
  source 1..20: mol_type = other DNA
tttcatggctgaatagtatt

SEQ ID NO: 279495 - DNA, 20 bp, synthetic construct
  source 1..20: mol_type = other DNA
ttttcatggctgaatagtat

SEQ ID NO: 279496 - DNA, 20 bp, synthetic construct
  source 1..20: mol_type = other DNA
tttttcatggctgaatagta

SEQ ID NO: 279497 - DNA, 20 bp, synthetic construct
  source 1..20: mol_type = other DNA
ctttttcatggctgaatagt

SEQ ID NO: 279498 - DNA, 20 bp, synthetic construct
  source 1..20: mol_type = other DNA
tctttttcatggctgaatag

SEQ ID NO: 279499 - DNA, 20 bp, synthetic construct
  source 1..20: mol_type = other DNA
ttctttttcatggctgaata

SEQ ID NO: 279500 - DNA, 20 bp, synthetic construct
  source 1..20: mol_type = other DNA
attctttttcatggctgaat

SEQ ID NO: 279501 - DNA, 20 bp, synthetic construct
  source 1..20: mol_type = other DNA
cattctttttcatggctgaa

SEQ ID NO: 279502 - DNA, 20 bp, synthetic construct
  source 1..20: mol_type = other DNA
tcattctttttcatggctga

SEQ ID NO: 279503 - DNA, 20 bp, synthetic construct
  source 1..20: mol_type = other DNA
ctcattctttttcatggctg

SEQ ID NO: 279504 - DNA, 20 bp, synthetic construct
  source 1..20: mol_type = other DNA
tctcattctttttcatggct

SEQ ID NO: 279505 - DNA, 20 bp, synthetic construct
  source 1..20: mol_type = other DNA
ttctcattctttttcatggc

SEQ ID NO: 279506 - DNA, 20 bp, synthetic construct
  source 1..20: mol_type = other DNA
attctcattctttttcatgg

SEQ ID NO: 279507 - DNA, 20 bp, synthetic construct
  source 1..20: mol_type = other DNA
gattctcattctttttcatg

SEQ ID NO: 279508 - DNA, 20 bp, synthetic construct
  source 1..20: mol_type = other DNA
agattctcattctttttcat

SEQ ID NO: 279509 - DNA, 20 bp, synthetic construct
  source 1..20: mol_type = other DNA
cagattctcattctttttca

SEQ ID NO: 279510 - DNA, 20 bp, synthetic construct
  source 1..20: mol_type = other DNA
acagattctcattctttttc

SEQ ID NO: 279511 - DNA, 20 bp, synthetic construct
  source 1..20: mol_type = other DNA
gacagattctcattcttttt

SEQ ID NO: 279512 - DNA, 20 bp, synthetic construct
  source 1..20: mol_type = other DNA
tgacagattctcattctttt

SEQ ID NO: 279513 - DNA, 20 bp, synthetic construct
  source 1..20: mol_type = other DNA
atgacagattctcattcttt

SEQ ID NO: 279514 - DNA, 20 bp, synthetic construct
  source 1..20: mol_type = other DNA
aatgacagattctcattctt

SEQ ID NO: 279515 - DNA, 20 bp, synthetic construct
  source 1..20: mol_type = other DNA
aaatgacagattctcattct

SEQ ID NO: 279516 - DNA, 20 bp, synthetic construct
  source 1..20: mol_type = other DNA
caaatgacagattctcattc

SEQ ID NO: 279517 - DNA, 20 bp, synthetic construct
  source 1..20: mol_type = other DNA
tcaaatgacagattctcatt

SEQ ID NO: 279518 - DNA, 20 bp, synthetic construct
  source 1..20: mol_type = other DNA
ttcaaatgacagattctcat

SEQ ID NO: 279519 - DNA, 20 bp, synthetic construct
  source 1..20: mol_type = other DNA
tttcaaatgacagattctca

SEQ ID NO: 279520 - DNA, 20 bp, synthetic construct
  source 1..20: mol_type = other DNA
gtttcaaatgacagattctc

SEQ ID NO: 279521 - DNA, 20 bp, synthetic construct
  source 1..20: mol_type = other DNA
tgtttcaaatgacagattct

SEQ ID NO: 279522 - DNA, 20 bp, synthetic construct
  source 1..20: mol_type = other DNA
ttgtttcaaatgacagattc

SEQ ID NO: 279523 - DNA, 20 bp, synthetic construct
  source 1..20: mol_type = other DNA
gttgtttcaaatgacagatt

SEQ ID NO: 279524 - DNA, 20 bp, synthetic construct
  source 1..20: mol_type = other DNA
tgttgtttcaaatgacagat

SEQ ID NO: 279525 - DNA, 20 bp, synthetic construct
  source 1..20: mol_type = other DNA
atgttgtttcaaatgacaga

SEQ ID NO: 279526 - DNA, 20 bp, synthetic construct
  source 1..20: mol_type = other DNA
catgttgtttcaaatgacag

SEQ ID NO: 279527 - DNA, 20 bp, synthetic construct
  source 1..20: mol_type = other DNA
ccatgttgtttcaaatgaca

SEQ ID NO: 279528 - DNA, 20 bp, synthetic construct
  source 1..20: mol_type = other DNA
tccatgttgtttcaaatgac

SEQ ID NO: 279529 - DNA, 20 bp, synthetic construct
  source 1..20: mol_type = other DNA
atccatgttgtttcaaatga

SEQ ID NO: 279530 - DNA, 20 bp, synthetic construct
  source 1..20: mol_type = other DNA
catccatgttgtttcaaatg

SEQ ID NO: 279531 - DNA, 20 bp, synthetic construct
  source 1..20: mol_type = other DNA
ccatccatgttgtttcaaat

SEQ ID NO: 279532 - DNA, 20 bp, synthetic construct
  source 1..20: mol_type = other DNA
tccatccatgttgtttcaaa

SEQ ID NO: 279533 - DNA, 20 bp, synthetic construct
  source 1..20: mol_type = other DNA
ttccatccatgttgtttcaa

SEQ ID NO: 279534 - DNA, 20 bp, synthetic construct
  source 1..20: mol_type = other DNA
gttccatccatgttgtttca

SEQ ID NO: 279535 - DNA, 20 bp, synthetic construct
  source 1..20: mol_type = other DNA
agttccatccatgttgtttc

SEQ ID NO: 279536 - DNA, 20 bp, synthetic construct
  source 1..20: mol_type = other DNA
cagttccatccatgttgttt

SEQ ID NO: 279537 - DNA, 20 bp, synthetic construct
  source 1..20: mol_type = other DNA
ccagttccatccatgttgtt

SEQ ID NO: 279538 - DNA, 20 bp, synthetic construct
  source 1..20: mol_type = other DNA
tccagttccatccatgttgt

SEQ ID NO: 279539 - DNA, 20 bp, synthetic construct
  source 1..20: mol_type = other DNA
ctccagttccatccatgttg

SEQ ID NO: 279540 - DNA, 20 bp, synthetic construct
  source 1..20: mol_type = other DNA
cctccagttccatccatgtt

SEQ ID NO: 279541 - DNA, 20 bp, synthetic construct
  source 1..20: mol_type = other DNA
tcctccagttccatccatgt

SEQ ID NO: 279542 - DNA, 20 bp, synthetic construct
  source 1..20: mol_type = other DNA
gtcctccagttccatccatg

SEQ ID NO: 279543 - DNA, 20 bp, synthetic construct
  source 1..20: mol_type = other DNA
tgtcctccagttccatccat

SEQ ID NO: 279544 - DNA, 20 bp, synthetic construct
  source 1..20: mol_type = other DNA
atgtcctccagttccatcca

SEQ ID NO: 279545 - DNA, 20 bp, synthetic construct
  source 1..20: mol_type = other DNA
aatgtcctccagttccatcc

SEQ ID NO: 279546 - DNA, 20 bp, synthetic construct
  source 1..20: mol_type = other DNA
taatgtcctccagttccatc

SEQ ID NO: 279547 - DNA, 20 bp, synthetic construct
  source 1..20: mol_type = other DNA
ataatgtcctccagttccat

SEQ ID NO: 279548 - DNA, 20 bp, synthetic construct
  source 1..20: mol_type = other DNA
cataatgtcctccagttcca

SEQ ID NO: 279549 - DNA, 20 bp, synthetic construct
  source 1..20: mol_type = other DNA
acataatgtcctccagttcc

SEQ ID NO: 279550 - DNA, 20 bp, synthetic construct
  source 1..20: mol_type = other DNA
aacataatgtcctccagttc

SEQ ID NO: 279551 - DNA, 20 bp, synthetic construct
  source 1..20: mol_type = other DNA
taacataatgtcctccagtt

SEQ ID NO: 279552 - DNA, 20 bp, synthetic construct
  source 1..20: mol_type = other DNA
ttaacataatgtcctccagt

SEQ ID NO: 279553 - DNA, 20 bp, synthetic construct
  source 1..20: mol_type = other DNA
cttaacataatgtcctccag

SEQ ID NO: 279554 - DNA, 20 bp, synthetic construct
  source 1..20: mol_type = other DNA
acttaacataatgtcctcca

SEQ ID NO: 279555 - DNA, 20 bp, synthetic construct
  source 1..20: mol_type = other DNA
cacttaacataatgtcctcc

SEQ ID NO: 279556 - DNA, 20 bp, synthetic construct
  source 1..20: mol_type = other DNA
tcacttaacataatgtcctc

SEQ ID NO: 279557 - DNA, 20 bp, synthetic construct
  source 1..20: mol_type = other DNA
ttcacttaacataatgtcct

SEQ ID NO: 279558 - DNA, 20 bp, synthetic construct
  source 1..20: mol_type = other DNA
tttcacttaacataatgtcc

SEQ ID NO: 279559 - DNA, 20 bp, synthetic construct
  source 1..20: mol_type = other DNA
atttcacttaacataatgtc

SEQ ID NO: 279560 - DNA, 20 bp, synthetic construct
  source 1..20: mol_type = other DNA
tatttcacttaacataatgt

SEQ ID NO: 279561 - DNA, 20 bp, synthetic construct
  source 1..20: mol_type = other DNA
ttatttcacttaacataatg

SEQ ID NO: 279562 - DNA, 20 bp, synthetic construct
  source 1..20: mol_type = other DNA
cttatttcacttaacataat

SEQ ID NO: 279563 - DNA, 20 bp, synthetic construct
  source 1..20: mol_type = other DNA
gcttatttcacttaacataa

SEQ ID NO: 279564 - DNA, 20 bp, synthetic construct
  source 1..20: mol_type = other DNA
ggcttatttcacttaacata

SEQ ID NO: 279565 - DNA, 20 bp, synthetic construct
  source 1..20: mol_type = other DNA
tggcttatttcacttaacat

SEQ ID NO: 279566 - DNA, 20 bp, synthetic construct
  source 1..20: mol_type = other DNA
ctggcttatttcacttaaca

SEQ ID NO: 279567 - DNA, 20 bp, synthetic construct
  source 1..20: mol_type = other DNA
tctggcttatttcacttaac

SEQ ID NO: 279568 - DNA, 20 bp, synthetic construct
  source 1..20: mol_type = other DNA
gtctggcttatttcacttaa

SEQ ID NO: 279569 - DNA, 20 bp, synthetic construct
  source 1..20: mol_type = other DNA
tgtctggcttatttcactta

SEQ ID NO: 279570 - DNA, 20 bp, synthetic construct
  source 1..20: mol_type = other DNA
ctgtctggcttatttcactt

SEQ ID NO: 279571 - DNA, 20 bp, synthetic construct
  source 1..20: mol_type = other DNA
tctgtctggcttatttcact

SEQ ID NO: 279572 - DNA, 20 bp, synthetic construct
  source 1..20: mol_type = other DNA
ttctgtctggcttatttcac

SEQ ID NO: 279573 - DNA, 20 bp, synthetic construct
  source 1..20: mol_type = other DNA
cttctgtctggcttatttca

SEQ ID NO: 279574 - DNA, 20 bp, synthetic construct
  source 1..20: mol_type = other DNA
ccttctgtctggcttatttc

SEQ ID NO: 279575 - DNA, 20 bp, synthetic construct
  source 1..20: mol_type = other DNA
tccttctgtctggcttattt

SEQ ID NO: 279576 - DNA, 20 bp, synthetic construct
  source 1..20: mol_type = other DNA
gtccttctgtctggcttatt

SEQ ID NO: 279577 - DNA, 20 bp, synthetic construct
  source 1..20: mol_type = other DNA
tgtccttctgtctggcttat

SEQ ID NO: 279578 - DNA, 20 bp, synthetic construct
  source 1..20: mol_type = other DNA
ctgtccttctgtctggctta

SEQ ID NO: 279579 - DNA, 20 bp, synthetic construct
  source 1..20: mol_type = other DNA
tctgtccttctgtctggctt

SEQ ID NO: 279580 - DNA, 20 bp, synthetic construct
  source 1..20: mol_type = other DNA
gtctgtccttctgtctggct

SEQ ID NO: 279581 - DNA, 20 bp, synthetic construct
  source 1..20: mol_type = other DNA
agtctgtccttctgtctggc

SEQ ID NO: 279582 - DNA, 20 bp, synthetic construct
  source 1..20: mol_type = other DNA
aagtctgtccttctgtctgg

SEQ ID NO: 279583 - DNA, 20 bp, synthetic construct
  source 1..20: mol_type = other DNA
gaagtctgtccttctgtctg

SEQ ID NO: 279584 - DNA, 20 bp, synthetic construct
  source 1..20: mol_type = other DNA
tgaagtctgtccttctgtct

SEQ ID NO: 279585 - DNA, 20 bp, synthetic construct
  source 1..20: mol_type = other DNA
gtgaagtctgtccttctgtc

SEQ ID NO: 279586 - DNA, 20 bp, synthetic construct
  source 1..20: mol_type = other DNA
tgtgaagtctgtccttctgt

SEQ ID NO: 279587 - DNA, 20 bp, synthetic construct
  source 1..20: mol_type = other DNA
atgtgaagtctgtccttctg

SEQ ID NO: 279588 - DNA, 20 bp, synthetic construct
  source 1..20: mol_type = other DNA
catgtgaagtctgtccttct

SEQ ID NO: 279589 - DNA, 20 bp, synthetic construct
  source 1..20: mol_type = other DNA
acatgtgaagtctgtccttc

SEQ ID NO: 279590 - DNA, 20 bp, synthetic construct
  source 1..20: mol_type = other DNA
aacatgtgaagtctgtcctt

SEQ ID NO: 279591 - DNA, 20 bp, synthetic construct
  source 1..20: mol_type = other DNA
gaacatgtgaagtctgtcct

SEQ ID NO: 279592 - DNA, 20 bp, synthetic construct
  source 1..20: mol_type = other DNA
agaacatgtgaagtctgtcc

SEQ ID NO: 279593 - DNA, 20 bp, synthetic construct
  source 1..20: mol_type = other DNA
gagaacatgtgaagtctgtc

SEQ ID NO: 279594 - DNA, 20 bp, synthetic construct
  source 1..20: mol_type = other DNA
tgagaacatgtgaagtctgt

SEQ ID NO: 279595 - DNA, 20 bp, synthetic construct
  source 1..20: mol_type = other DNA
gtgagaacatgtgaagtctg

SEQ ID NO: 279596 - DNA, 20 bp, synthetic construct
  source 1..20: mol_type = other DNA
tgtgagaacatgtgaagtct

SEQ ID NO: 279597 - DNA, 20 bp, synthetic construct
  source 1..20: mol_type = other DNA
gtgtgagaacatgtgaagtc

SEQ ID NO: 279598 - DNA, 20 bp, synthetic construct
  source 1..20: mol_type = other DNA
tgtgtgagaacatgtgaagt

SEQ ID NO: 279599 - DNA, 20 bp, synthetic construct
  source 1..20: mol_type = other DNA
atgtgtgagaacatgtgaag

SEQ ID NO: 279600 - DNA, 20 bp, synthetic construct
  source 1..20: mol_type = other DNA
aatgtgtgagaacatgtgaa

SEQ ID NO: 279601 - DNA, 20 bp, synthetic construct
  source 1..20: mol_type = other DNA
aaatgtgtgagaacatgtga

SEQ ID NO: 279602 - DNA, 20 bp, synthetic construct
  source 1..20: mol_type = other DNA
caaatgtgtgagaacatgtg

SEQ ID NO: 279603 - DNA, 20 bp, synthetic construct
  source 1..20: mol_type = other DNA
acaaatgtgtgagaacatgt

SEQ ID NO: 279604 - DNA, 20 bp, synthetic construct
  source 1..20: mol_type = other DNA
cacaaatgtgtgagaacatg

SEQ ID NO: 279605 - DNA, 20 bp, synthetic construct
  source 1..20: mol_type = other DNA
ccacaaatgtgtgagaacat

SEQ ID NO: 279606 - DNA, 20 bp, synthetic construct
  source 1..20: mol_type = other DNA
cccacaaatgtgtgagaaca

SEQ ID NO: 279607 - DNA, 20 bp, synthetic construct
  source 1..20: mol_type = other DNA
tcccacaaatgtgtgagaac

SEQ ID NO: 279608 - DNA, 20 bp, synthetic construct
  source 1..20: mol_type = other DNA
ctcccacaaatgtgtgagaa

SEQ ID NO: 279609 - DNA, 20 bp, synthetic construct
  source 1..20: mol_type = other DNA
gctcccacaaatgtgtgaga

SEQ ID NO: 279610 - DNA, 20 bp, synthetic construct
  source 1..20: mol_type = other DNA
agctcccacaaatgtgtgag

SEQ ID NO: 279611 - DNA, 20 bp, synthetic construct
  source 1..20: mol_type = other DNA
tagctcccacaaatgtgtga

SEQ ID NO: 279612 - DNA, 20 bp, synthetic construct
  source 1..20: mol_type = other DNA
ttagctcccacaaatgtgtg

SEQ ID NO: 279613 - DNA, 20 bp, synthetic construct
  source 1..20: mol_type = other DNA
tttagctcccacaaatgtgt

SEQ ID NO: 279614 - DNA, 20 bp, synthetic construct
  source 1..20: mol_type = other DNA
ttttagctcccacaaatgtg

SEQ ID NO: 279615 - DNA, 20 bp, synthetic construct
  source 1..20: mol_type = other DNA
tttttagctcccacaaatgt

SEQ ID NO: 279616 - DNA, 20 bp, synthetic construct
  source 1..20: mol_type = other DNA
atttttagctcccacaaatg

SEQ ID NO: 279617 - DNA, 20 bp, synthetic construct
  source 1..20: mol_type = other DNA
aatttttagctcccacaaat

SEQ ID NO: 279618 - DNA, 20 bp, synthetic construct
  source 1..20: mol_type = other DNA
taatttttagctcccacaaa

SEQ ID NO: 279619 - DNA, 20 bp, synthetic construct
  source 1..20: mol_type = other DNA
ttaatttttagctcccacaa

SEQ ID NO: 279620 - DNA, 20 bp, synthetic construct
  source 1..20: mol_type = other DNA
tttaatttttagctcccaca

SEQ ID NO: 279621 - DNA, 20 bp, synthetic construct
  source 1..20: mol_type = other DNA
gtttaatttttagctcccac

SEQ ID NO: 279622 - DNA, 20 bp, synthetic construct
  source 1..20: mol_type = other DNA
agtttaatttttagctccca

SEQ ID NO: 279623 - DNA, 20 bp, synthetic construct
  source 1..20: mol_type = other DNA
gagtttaatttttagctccc

SEQ ID NO: 279624 - DNA, 20 bp, synthetic construct
  source 1..20: mol_type = other DNA
tgagtttaatttttagctcc

SEQ ID NO: 279625 - DNA, 20 bp, synthetic construct
  source 1..20: mol_type = other DNA
atgagtttaatttttagctc

SEQ ID NO: 279626 - DNA, 20 bp, synthetic construct
  source 1..20: mol_type = other DNA
catgagtttaatttttagct

SEQ ID NO: 279627 - DNA, 20 bp, synthetic construct
  source 1..20: mol_type = other DNA
ccatgagtttaatttttagc

SEQ ID NO: 279628 - DNA, 20 bp, synthetic construct
  source 1..20: mol_type = other DNA
tccatgagtttaatttttag

SEQ ID NO: 279629 - DNA, 20 bp, synthetic construct
  source 1..20: mol_type = other DNA
ctccatgagtttaattttta

SEQ ID NO: 279630 - DNA, 20 bp, synthetic construct
  source 1..20: mol_type = other DNA
tctccatgagtttaattttt

SEQ ID NO: 279631 - DNA, 20 bp, synthetic construct
  source 1..20: mol_type = other DNA
atctccatgagtttaatttt

SEQ ID NO: 279632 - DNA, 20 bp, synthetic construct
  source 1..20: mol_type = other DNA
tatctccatgagtttaattt

SEQ ID NO: 279633 - DNA, 20 bp, synthetic construct
  source 1..20: mol_type = other DNA
ctatctccatgagtttaatt

SEQ ID NO: 279634 - DNA, 20 bp, synthetic construct
  source 1..20: mol_type = other DNA
tctatctccatgagtttaat

SEQ ID NO: 279635 - DNA, 20 bp, synthetic construct
  source 1..20: mol_type = other DNA
ctctatctccatgagtttaa

SEQ ID NO: 279636 - DNA, 20 bp, synthetic construct
  source 1..20: mol_type = other DNA
tctctatctccatgagttta

SEQ ID NO: 279637 - DNA, 20 bp, synthetic construct
  source 1..20: mol_type = other DNA
ctctctatctccatgagttt

SEQ ID NO: 279638 - DNA, 20 bp, synthetic construct
  source 1..20: mol_type = other DNA
actctctatctccatgagtt

SEQ ID NO: 279639 - DNA, 20 bp, synthetic construct
  source 1..20: mol_type = other DNA
tactctctatctccatgagt

SEQ ID NO: 279640 - DNA, 20 bp, synthetic construct
  source 1..20: mol_type = other DNA
ctactctctatctccatgag

SEQ ID NO: 279641 - DNA, 20 bp, synthetic construct
  source 1..20: mol_type = other DNA
tctactctctatctccatga

SEQ ID NO: 279642 - DNA, 20 bp, synthetic construct
  source 1..20: mol_type = other DNA
ttctactctctatctccatg

SEQ ID NO: 279643 - DNA, 20 bp, synthetic construct
  source 1..20: mol_type = other DNA
cttctactctctatctccat

SEQ ID NO: 279644 - DNA, 20 bp, synthetic construct
  source 1..20: mol_type = other DNA
ccttctactctctatctcca

SEQ ID NO: 279645 - DNA, 20 bp, synthetic construct
  source 1..20: mol_type = other DNA
tccttctactctctatctcc

SEQ ID NO: 279646 - DNA, 20 bp, synthetic construct
  source 1..20: mol_type = other DNA
atccttctactctctatctc

SEQ ID NO: 279647 - DNA, 20 bp, synthetic construct
  source 1..20: mol_type = other DNA
catccttctactctctatct

SEQ ID NO: 279648 - DNA, 20 bp, synthetic construct
  source 1..20: mol_type = other DNA
ccatccttctactctctatc

SEQ ID NO: 279649 - DNA, 20 bp, synthetic construct
  source 1..20: mol_type = other DNA
accatccttctactctctat

SEQ ID NO: 279650 - DNA, 20 bp, synthetic construct
  source 1..20: mol_type = other DNA
aaccatccttctactctcta

SEQ ID NO: 279651 - DNA, 20 bp, synthetic construct
  source 1..20: mol_type = other DNA
taaccatccttctactctct

SEQ ID NO: 279652 - DNA, 20 bp, synthetic construct
  source 1..20: mol_type = other DNA
gtaaccatccttctactctc

SEQ ID NO: 279653 - DNA, 20 bp, synthetic construct
  source 1..20: mol_type = other DNA
ggtaaccatccttctactct

SEQ ID NO: 279654 - DNA, 20 bp, synthetic construct
  source 1..20: mol_type = other DNA
tggtaaccatccttctactc

SEQ ID NO: 279655 - DNA, 20 bp, synthetic construct
  source 1..20: mol_type = other DNA
ctggtaaccatccttctact

SEQ ID NO: 279656 - DNA, 20 bp, synthetic construct
  source 1..20: mol_type = other DNA
tctggtaaccatccttctac

SEQ ID NO: 279657 - DNA, 20 bp, synthetic construct
  source 1..20: mol_type = other DNA
ctctggtaaccatccttcta

SEQ ID NO: 279658 - DNA, 20 bp, synthetic construct
  source 1..20: mol_type = other DNA
cctctggtaaccatccttct

SEQ ID NO: 279659 - DNA, 20 bp, synthetic construct
  source 1..20: mol_type = other DNA
gcctctggtaaccatccttc

SEQ ID NO: 279660 - DNA, 20 bp, synthetic construct
  source 1..20: mol_type = other DNA
agcctctggtaaccatcctt

SEQ ID NO: 279661 - DNA, 20 bp, synthetic construct
  source 1..20: mol_type = other DNA
cagcctctggtaaccatcct

SEQ ID NO: 279662 - DNA, 20 bp, synthetic construct
  source 1..20: mol_type = other DNA
tcagcctctggtaaccatcc

SEQ ID NO: 279663 - DNA, 20 bp, synthetic construct
  source 1..20: mol_type = other DNA
ctcagcctctggtaaccatc

SEQ ID NO: 279664 - DNA, 20 bp, synthetic construct
  source 1..20: mol_type = other DNA
cctcagcctctggtaaccat

SEQ ID NO: 279665 - DNA, 20 bp, synthetic construct
  source 1..20: mol_type = other DNA
tcctcagcctctggtaacca

SEQ ID NO: 279666 - DNA, 20 bp, synthetic construct
  source 1..20: mol_type = other DNA
ctcctcagcctctggtaacc

SEQ ID NO: 279667 - DNA, 20 bp, synthetic construct
  source 1..20: mol_type = other DNA
cctcctcagcctctggtaac

SEQ ID NO: 279668 - DNA, 20 bp, synthetic construct
  source 1..20: mol_type = other DNA
ccctcctcagcctctggtaa

SEQ ID NO: 279669 - DNA, 20 bp, synthetic construct
  source 1..20: mol_type = other DNA
accctcctcagcctctggta

SEQ ID NO: 279670 - DNA, 20 bp, synthetic construct
  source 1..20: mol_type = other DNA
caccctcctcagcctctggt

SEQ ID NO: 279671 - DNA, 20 bp, synthetic construct
  source 1..20: mol_type = other DNA
ccaccctcctcagcctctgg

SEQ ID NO: 279672 - DNA, 20 bp, synthetic construct
  source 1..20: mol_type = other DNA
tccaccctcctcagcctctg

SEQ ID NO: 279673 - DNA, 20 bp, synthetic construct
  source 1..20: mol_type = other DNA
ctccaccctcctcagcctct

SEQ ID NO: 279674 - DNA, 20 bp, synthetic construct
  source 1..20: mol_type = other DNA
cctccaccctcctcagcctc

SEQ ID NO: 279675 - DNA, 20 bp, synthetic construct
  source 1..20: mol_type = other DNA
ccctccaccctcctcagcct

SEQ ID NO: 279676 - DNA, 20 bp, synthetic construct
  source 1..20: mol_type = other DNA
cccctccaccctcctcagcc

SEQ ID NO: 279677 - DNA, 20 bp, synthetic construct
  source 1..20: mol_type = other DNA
tcccctccaccctcctcagc

SEQ ID NO: 279678 - DNA, 20 bp, synthetic construct
  source 1..20: mol_type = other DNA
ctcccctccaccctcctcag

SEQ ID NO: 279679 - DNA, 20 bp, synthetic construct
  source 1..20: mol_type = other DNA
gctcccctccaccctcctca

SEQ ID NO: 279680 - DNA, 20 bp, synthetic construct
  source 1..20: mol_type = other DNA
tgctcccctccaccctcctc

SEQ ID NO: 279681 - DNA, 20 bp, synthetic construct
  source 1..20: mol_type = other DNA
ctgctcccctccaccctcct

SEQ ID NO: 279682 - DNA, 20 bp, synthetic construct
  source 1..20: mol_type = other DNA
cctgctcccctccaccctcc

SEQ ID NO: 279683 - DNA, 20 bp, synthetic construct
  source 1..20: mol_type = other DNA
ccctgctcccctccaccctc

SEQ ID NO: 279684 - DNA, 20 bp, synthetic construct
  source 1..20: mol_type = other DNA
tccctgctcccctccaccct

SEQ ID NO: 279685 - DNA, 20 bp, synthetic construct
  source 1..20: mol_type = other DNA
ctccctgctcccctccaccc

SEQ ID NO: 279686 - DNA, 20 bp, synthetic construct
  source 1..20: mol_type = other DNA
tctccctgctcccctccacc

SEQ ID NO: 279687 - DNA, 20 bp, synthetic construct
  source 1..20: mol_type = other DNA
ttctccctgctcccctccac

SEQ ID NO: 279688 - DNA, 20 bp, synthetic construct
  source 1..20: mol_type = other DNA
tttctccctgctcccctcca

SEQ ID NO: 279689 - DNA, 20 bp, synthetic construct
  source 1..20: mol_type = other DNA
ctttctccctgctcccctcc

SEQ ID NO: 279690 - DNA, 20 bp, synthetic construct
  source 1..20: mol_type = other DNA
actttctccctgctcccctc

SEQ ID NO: 279691 - DNA, 20 bp, synthetic construct
  source 1..20: mol_type = other DNA
tactttctccctgctcccct

SEQ ID NO: 279692 - DNA, 20 bp, synthetic construct
  source 1..20: mol_type = other DNA
ctactttctccctgctcccc

SEQ ID NO: 279693 - DNA, 20 bp, synthetic construct
  source 1..20: mol_type = other DNA
cctactttctccctgctccc

SEQ ID NO: 279694 - DNA, 20 bp, synthetic construct
  source 1..20: mol_type = other DNA
ccctactttctccctgctcc

SEQ ID NO: 279695 - DNA, 20 bp, synthetic construct
  source 1..20: mol_type = other DNA
tccctactttctccctgctc

SEQ ID NO: 279696 - DNA, 20 bp, synthetic construct
  source 1..20: mol_type = other DNA
atccctactttctccctgct

SEQ ID NO: 279697 - DNA, 20 bp, synthetic construct
  source 1..20: mol_type = other DNA
catccctactttctccctgc

SEQ ID NO: 279698 - DNA, 20 bp, synthetic construct
  source 1..20: mol_type = other DNA
ccatccctactttctccctg

SEQ ID NO: 279699 - DNA, 20 bp, synthetic construct
  source 1..20: mol_type = other DNA
accatccctactttctccct

SEQ ID NO: 279700 - DNA, 20 bp, synthetic construct
  source 1..20: mol_type = other DNA
aaccatccctactttctccc

SEQ ID NO: 279701 - DNA, 20 bp, synthetic construct
  source 1..20: mol_type = other DNA
taaccatccctactttctcc

SEQ ID NO: 279702 - DNA, 20 bp, synthetic construct
  source 1..20: mol_type = other DNA
ttaaccatccctactttctc

SEQ ID NO: 279703 - DNA, 20 bp, synthetic construct
  source 1..20: mol_type = other DNA
attaaccatccctactttct

SEQ ID NO: 279704 - DNA, 20 bp, synthetic construct
  source 1..20: mol_type = other DNA
cattaaccatccctactttc

SEQ ID NO: 279705 - DNA, 20 bp, synthetic construct
  source 1..20: mol_type = other DNA
ccattaaccatccctacttt

SEQ ID NO: 279706 - DNA, 20 bp, synthetic construct
  source 1..20: mol_type = other DNA
cccattaaccatccctactt

SEQ ID NO: 279707 - DNA, 20 bp, synthetic construct
  source 1..20: mol_type = other DNA
acccattaaccatccctact

SEQ ID NO: 279708 - DNA, 20 bp, synthetic construct
  source 1..20: mol_type = other DNA
tacccattaaccatccctac

SEQ ID NO: 279709 - DNA, 20 bp, synthetic construct
  source 1..20: mol_type = other DNA
gtacccattaaccatcccta

SEQ ID NO: 279710 - DNA, 20 bp, synthetic construct
  source 1..20: mol_type = other DNA
tgtacccattaaccatccct

SEQ ID NO: 279711 - DNA, 20 bp, synthetic construct
  source 1..20: mol_type = other DNA
ttgtacccattaaccatccc

SEQ ID NO: 279712 - DNA, 20 bp, synthetic construct
  source 1..20: mol_type = other DNA
tttgtacccattaaccatcc

SEQ ID NO: 279713 - DNA, 20 bp, synthetic construct
  source 1..20: mol_type = other DNA
ttttgtacccattaaccatc

SEQ ID NO: 279714 - DNA, 20 bp, synthetic construct
  source 1..20: mol_type = other DNA
tttttgtacccattaaccat

SEQ ID NO: 279715 - DNA, 20 bp, synthetic construct
  source 1..20: mol_type = other DNA
gtttttgtacccattaacca

SEQ ID NO: 279716 - DNA, 20 bp, synthetic construct
  source 1..20: mol_type = other DNA
cgtttttgtacccattaacc

SEQ ID NO: 279717 - DNA, 20 bp, synthetic construct
  source 1..20: mol_type = other DNA
acgtttttgtacccattaac

SEQ ID NO: 279718 - DNA, 20 bp, synthetic construct
  source 1..20: mol_type = other DNA
tacgtttttgtacccattaa

SEQ ID NO: 279719 - DNA, 20 bp, synthetic construct
  source 1..20: mol_type = other DNA
ctacgtttttgtacccatta

SEQ ID NO: 279720 - DNA, 20 bp, synthetic construct
  source 1..20: mol_type = other DNA
actacgtttttgtacccatt

SEQ ID NO: 279721 - DNA, 20 bp, synthetic construct
  source 1..20: mol_type = other DNA
aactacgtttttgtacccat

SEQ ID NO: 279722 - DNA, 20 bp, synthetic construct
  source 1..20: mol_type = other DNA
taactacgtttttgtaccca

SEQ ID NO: 279723 - DNA, 20 bp, synthetic construct
  source 1..20: mol_type = other DNA
ctaactacgtttttgtaccc

SEQ ID NO: 279724 - DNA, 20 bp, synthetic construct
  source 1..20: mol_type = other DNA
gctaactacgtttttgtacc

SEQ ID NO: 279725 - DNA, 20 bp, synthetic construct
  source 1..20: mol_type = other DNA
tgctaactacgtttttgtac

SEQ ID NO: 279726 - DNA, 20 bp, synthetic construct
  source 1..20: mol_type = other DNA
atgctaactacgtttttgta

SEQ ID NO: 279727 - DNA, 20 bp, synthetic construct
  source 1..20: mol_type = other DNA
catgctaactacgtttttgt

SEQ ID NO: 279728 - DNA, 20 bp, synthetic construct
  source 1..20: mol_type = other DNA
gcatgctaactacgtttttg

SEQ ID NO: 279729 - DNA, 20 bp, synthetic construct
  source 1..20: mol_type = other DNA
tgcatgctaactacgttttt

SEQ ID NO: 279730 - DNA, 20 bp, synthetic construct
  source 1..20: mol_type = other DNA
atgcatgctaactacgtttt

SEQ ID NO: 279731 - DNA, 20 bp, synthetic construct
  source 1..20: mol_type = other DNA
tatgcatgctaactacgttt

SEQ ID NO: 279732 - DNA, 20 bp, synthetic construct
  source 1..20: mol_type = other DNA
ctatgcatgctaactacgtt

SEQ ID NO: 279733 - DNA, 20 bp, synthetic construct
  source 1..20: mol_type = other DNA
tctatgcatgctaactacgt

SEQ ID NO: 279734 - DNA, 20 bp, synthetic construct
  source 1..20: mol_type = other DNA
atctatgcatgctaactacg

SEQ ID NO: 279735 - DNA, 20 bp, synthetic construct
  source 1..20: mol_type = other DNA
gatctatgcatgctaactac

SEQ ID NO: 279736 - DNA, 20 bp, synthetic construct
  source 1..20: mol_type = other DNA
agatctatgcatgctaacta

SEQ ID NO: 279737 - DNA, 20 bp, synthetic construct
  source 1..20: mol_type = other DNA
tagatctatgcatgctaact

SEQ ID NO: 279738 - DNA, 20 bp, synthetic construct
  source 1..20: mol_type = other DNA
ctagatctatgcatgctaac

SEQ ID NO: 279739 - DNA, 20 bp, synthetic construct
  source 1..20: mol_type = other DNA
actagatctatgcatgctaa

SEQ ID NO: 279740 - DNA, 20 bp, synthetic construct
  source 1..20: mol_type = other DNA
tactagatctatgcatgcta

SEQ ID NO: 279741 - DNA, 20 bp, synthetic construct
  source 1..20: mol_type = other DNA
atactagatctatgcatgct

SEQ ID NO: 279742 - DNA, 20 bp, synthetic construct
  source 1..20: mol_type = other DNA
aatactagatctatgcatgc

SEQ ID NO: 279743 - DNA, 20 bp, synthetic construct
  source 1..20: mol_type = other DNA
caatactagatctatgcatg

SEQ ID NO: 279744 - DNA, 20 bp, synthetic construct
  source 1..20: mol_type = other DNA
ccaatactagatctatgcat

SEQ ID NO: 279745 - DNA, 20 bp, synthetic construct
  source 1..20: mol_type = other DNA
tccaatactagatctatgca

SEQ ID NO: 279746 - DNA, 20 bp, synthetic construct
  source 1..20: mol_type = other DNA
atccaatactagatctatgc

SEQ ID NO: 279747 - DNA, 20 bp, synthetic construct
  source 1..20: mol_type = other DNA
tatccaatactagatctatg

SEQ ID NO: 279748 - DNA, 20 bp, synthetic construct
  source 1..20: mol_type = other DNA
ctatccaatactagatctat

SEQ ID NO: 279749 - DNA, 20 bp, synthetic construct
  source 1..20: mol_type = other DNA
gctatccaatactagatcta

SEQ ID NO: 279750 - DNA, 20 bp, synthetic construct
  source 1..20: mol_type = other DNA
tgctatccaatactagatct

SEQ ID NO: 279751 - DNA, 20 bp, synthetic construct
  source 1..20: mol_type = other DNA
gtgctatccaatactagatc

SEQ ID NO: 279752 - DNA, 20 bp, synthetic construct
  source 1..20: mol_type = other DNA
tgtgctatccaatactagat

SEQ ID NO: 279753 - DNA, 20 bp, synthetic construct
  source 1..20: mol_type = other DNA
ctgtgctatccaatactaga

SEQ ID NO: 279754 - DNA, 20 bp, synthetic construct
  source 1..20: mol_type = other DNA
gctgtgctatccaatactag

SEQ ID NO: 279755 - DNA, 20 bp, synthetic construct
  source 1..20: mol_type = other DNA
tgctgtgctatccaatacta

SEQ ID NO: 279756 - DNA, 20 bp, synthetic construct
  source 1..20: mol_type = other DNA
ctgctgtgctatccaatact

SEQ ID NO: 279757 - DNA, 20 bp, synthetic construct
  source 1..20: mol_type = other DNA
cctgctgtgctatccaatac

SEQ ID NO: 279758 - DNA, 20 bp, synthetic construct
  source 1..20: mol_type = other DNA
ccctgctgtgctatccaata

SEQ ID NO: 279759 - DNA, 20 bp, synthetic construct
  source 1..20: mol_type = other DNA
accctgctgtgctatccaat

SEQ ID NO: 279760 - DNA, 20 bp, synthetic construct
  source 1..20: mol_type = other DNA
caccctgctgtgctatccaa

SEQ ID NO: 279761 - DNA, 20 bp, synthetic construct
  source 1..20: mol_type = other DNA
tcaccctgctgtgctatcca

SEQ ID NO: 279762 - DNA, 20 bp, synthetic construct
  source 1..20: mol_type = other DNA
gtcaccctgctgtgctatcc

SEQ ID NO: 279763 - DNA, 20 bp, synthetic construct
  source 1..20: mol_type = other DNA
cgtcaccctgctgtgctatc

SEQ ID NO: 279764 - DNA, 20 bp, synthetic construct
  source 1..20: mol_type = other DNA
tcgtcaccctgctgtgctat

SEQ ID NO: 279765 - DNA, 20 bp, synthetic construct
  source 1..20: mol_type = other DNA
gtcgtcaccctgctgtgcta

SEQ ID NO: 279766 - DNA, 20 bp, synthetic construct
  source 1..20: mol_type = other DNA
tgtcgtcaccctgctgtgct

SEQ ID NO: 279767 - DNA, 20 bp, synthetic construct
  source 1..20: mol_type = other DNA
ctgtcgtcaccctgctgtgc

SEQ ID NO: 279768 - DNA, 20 bp, synthetic construct
  source 1..20: mol_type = other DNA
gctgtcgtcaccctgctgtg

SEQ ID NO: 279769 - DNA, 20 bp, synthetic construct
  source 1..20: mol_type = other DNA
ggctgtcgtcaccctgctgt

SEQ ID NO: 279770 - DNA, 20 bp, synthetic construct
  source 1..20: mol_type = other DNA
tggctgtcgtcaccctgctg

SEQ ID NO: 279771 - DNA, 20 bp, synthetic construct
  source 1..20: mol_type = other DNA
ttggctgtcgtcaccctgct

SEQ ID NO: 279772 - DNA, 20 bp, synthetic construct
  source 1..20: mol_type = other DNA
gttggctgtcgtcaccctgc

SEQ ID NO: 279773 - DNA, 20 bp, synthetic construct
  source 1..20: mol_type = other DNA
tgttggctgtcgtcaccctg

SEQ ID NO: 279774 - DNA, 20 bp, synthetic construct
  source 1..20: mol_type = other DNA
ctgttggctgtcgtcaccct

SEQ ID NO: 279775 - DNA, 20 bp, synthetic construct
  source 1..20: mol_type = other DNA
actgttggctgtcgtcaccc

SEQ ID NO: 279776 - DNA, 20 bp, synthetic construct
  source 1..20: mol_type = other DNA
tactgttggctgtcgtcacc

SEQ ID NO: 279777 - DNA, 20 bp, synthetic construct
  source 1..20: mol_type = other DNA
ttactgttggctgtcgtcac

SEQ ID NO: 279778 - DNA, 20 bp, synthetic construct
  source 1..20: mol_type = other DNA
attactgttggctgtcgtca

SEQ ID NO: 279779 - DNA, 20 bp, synthetic construct
  source 1..20: mol_type = other DNA
aattactgttggctgtcgtc

SEQ ID NO: 279780 - DNA, 20 bp, synthetic construct
  source 1..20: mol_type = other DNA
aaattactgttggctgtcgt

SEQ ID NO: 279781 - DNA, 20 bp, synthetic construct
  source 1..20: mol_type = other DNA
taaattactgttggctgtcg

SEQ ID NO: 279782 - DNA, 20 bp, synthetic construct
  source 1..20: mol_type = other DNA
ataaattactgttggctgtc

SEQ ID NO: 279783 - DNA, 20 bp, synthetic construct
  source 1..20: mol_type = other DNA
tataaattactgttggctgt

SEQ ID NO: 279784 - DNA, 20 bp, synthetic construct
  source 1..20: mol_type = other DNA
ctataaattactgttggctg

SEQ ID NO: 279785 - DNA, 20 bp, synthetic construct
  source 1..20: mol_type = other DNA
actataaattactgttggct

SEQ ID NO: 279786 - DNA, 20 bp, synthetic construct
  source 1..20: mol_type = other DNA
tactataaattactgttggc

SEQ ID NO: 279787 - DNA, 20 bp, synthetic construct
  source 1..20: mol_type = other DNA
gtactataaattactgttgg

SEQ ID NO: 279788 - DNA, 20 bp, synthetic construct
  source 1..20: mol_type = other DNA
tgtactataaattactgttg

SEQ ID NO: 279789 - DNA, 20 bp, synthetic construct
  source 1..20: mol_type = other DNA
atgtactataaattactgtt

SEQ ID NO: 279790 - DNA, 20 bp, synthetic construct
  source 1..20: mol_type = other DNA
aatgtactataaattactgt

SEQ ID NO: 279791 - DNA, 20 bp, synthetic construct
  source 1..20: mol_type = other DNA
aaatgtactataaattactg

SEQ ID NO: 279792 - DNA, 20 bp, synthetic construct
  source 1..20: mol_type = other DNA
taaatgtactataaattact

SEQ ID NO: 279793 - DNA, 20 bp, synthetic construct
  source 1..20: mol_type = other DNA
ttaaatgtactataaattac

SEQ ID NO: 279794 - DNA, 20 bp, synthetic construct
  source 1..20: mol_type = other DNA
tttaaatgtactataaatta

SEQ ID NO: 279795 - DNA, 20 bp, synthetic construct
  source 1..20: mol_type = other DNA
ttttaaatgtactataaatt

SEQ ID NO: 279796 - DNA, 20 bp, synthetic construct
  source 1..20: mol_type = other DNA
tttttaaatgtactataaat

SEQ ID NO: 279797 - DNA, 20 bp, synthetic construct
  source 1..20: mol_type = other DNA
gtttttaaatgtactataaa

SEQ ID NO: 279798 - DNA, 20 bp, synthetic construct
  source 1..20: mol_type = other DNA
tgtttttaaatgtactataa

SEQ ID NO: 279799 - DNA, 20 bp, synthetic construct
  source 1..20: mol_type = other DNA
ttgtttttaaatgtactata

SEQ ID NO: 279800 - DNA, 20 bp, synthetic construct
  source 1..20: mol_type = other DNA
gttgtttttaaatgtactat

SEQ ID NO: 279801 - DNA, 20 bp, synthetic construct
  source 1..20: mol_type = other DNA
agttgtttttaaatgtacta

SEQ ID NO: 279802 - DNA, 20 bp, synthetic construct
  source 1..20: mol_type = other DNA
tagttgtttttaaatgtact

SEQ ID NO: 279803 - DNA, 20 bp, synthetic construct
  source 1..20: mol_type = other DNA
ttagttgtttttaaatgtac

SEQ ID NO: 279804 - DNA, 20 bp, synthetic construct
  source 1..20: mol_type = other DNA
tttagttgtttttaaatgta

SEQ ID NO: 279805 - DNA, 20 bp, synthetic construct
  source 1..20: mol_type = other DNA
ttttagttgtttttaaatgt

SEQ ID NO: 279806 - DNA, 20 bp, synthetic construct
  source 1..20: mol_type = other DNA
cttttagttgtttttaaatg

SEQ ID NO: 279807 - DNA, 20 bp, synthetic construct
  source 1..20: mol_type = other DNA
tcttttagttgtttttaaat

SEQ ID NO: 279808 - DNA, 20 bp, synthetic construct
  source 1..20: mol_type = other DNA
ctcttttagttgtttttaaa

SEQ ID NO: 279809 - DNA, 20 bp, synthetic construct
  source 1..20: mol_type = other DNA
actcttttagttgtttttaa

SEQ ID NO: 279810 - DNA, 20 bp, synthetic construct
  source 1..20: mol_type = other DNA
cactcttttagttgttttta

SEQ ID NO: 279811 - DNA, 20 bp, synthetic construct
  source 1..20: mol_type = other DNA
acactcttttagttgttttt

SEQ ID NO: 279812 - DNA, 20 bp, synthetic construct
  source 1..20: mol_type = other DNA
tacactcttttagttgtttt

SEQ ID NO: 279813 - DNA, 20 bp, synthetic construct
  source 1..20: mol_type = other DNA
ttacactcttttagttgttt

SEQ ID NO: 279814 - DNA, 20 bp, synthetic construct
  source 1..20: mol_type = other DNA
attacactcttttagttgtt

SEQ ID NO: 279815 - DNA, 20 bp, synthetic construct
  source 1..20: mol_type = other DNA
aattacactcttttagttgt

SEQ ID NO: 279816 - DNA, 20 bp, synthetic construct
  source 1..20: mol_type = other DNA
caattacactcttttagttg

SEQ ID NO: 279817 - DNA, 20 bp, synthetic construct
  source 1..20: mol_type = other DNA
ccaattacactcttttagtt

SEQ ID NO: 279818 - DNA, 20 bp, synthetic construct
  source 1..20: mol_type = other DNA
tccaattacactcttttagt

SEQ ID NO: 279819 - DNA, 20 bp, synthetic construct
  source 1..20: mol_type = other DNA
gtccaattacactcttttag

SEQ ID NO: 279820 - DNA, 20 bp, synthetic construct
  source 1..20: mol_type = other DNA
agtccaattacactctttta

SEQ ID NO: 279821 - DNA, 20 bp, synthetic construct
  source 1..20: mol_type = other DNA
cagtccaattacactctttt

SEQ ID NO: 279822 - DNA, 20 bp, synthetic construct
  source 1..20: mol_type = other DNA
ccagtccaattacactcttt

SEQ ID NO: 279823 - DNA, 20 bp, synthetic construct
  source 1..20: mol_type = other DNA
gccagtccaattacactctt

SEQ ID NO: 279824 - DNA, 20 bp, synthetic construct
  source 1..20: mol_type = other DNA
agccagtccaattacactct

SEQ ID NO: 279825 - DNA, 20 bp, synthetic construct
  source 1..20: mol_type = other DNA
tagccagtccaattacactc

SEQ ID NO: 279826 - DNA, 20 bp, synthetic construct
  source 1..20: mol_type = other DNA
ttagccagtccaattacact

SEQ ID NO: 279827 - DNA, 20 bp, synthetic construct
  source 1..20: mol_type = other DNA
gttagccagtccaattacac

SEQ ID NO: 279828 - DNA, 20 bp, synthetic construct
  source 1..20: mol_type = other DNA
tgttagccagtccaattaca

SEQ ID NO: 279829 - DNA, 20 bp, synthetic construct
  source 1..20: mol_type = other DNA
atgttagccagtccaattac

SEQ ID NO: 279830 - DNA, 20 bp, synthetic construct
  source 1..20: mol_type = other DNA
catgttagccagtccaatta

SEQ ID NO: 279831 - DNA, 20 bp, synthetic construct
  source 1..20: mol_type = other DNA
ccatgttagccagtccaatt

SEQ ID NO: 279832 - DNA, 20 bp, synthetic construct
  source 1..20: mol_type = other DNA
accatgttagccagtccaat

SEQ ID NO: 279833 - DNA, 20 bp, synthetic construct
  source 1..20: mol_type = other DNA
caccatgttagccagtccaa

SEQ ID NO: 279834 - DNA, 20 bp, synthetic construct
  source 1..20: mol_type = other DNA
tcaccatgttagccagtcca

SEQ ID NO: 279835 - DNA, 20 bp, synthetic construct
  source 1..20: mol_type = other DNA
ttcaccatgttagccagtcc

SEQ ID NO: 279836 - DNA, 20 bp, synthetic construct
  source 1..20: mol_type = other DNA
tttcaccatgttagccagtc

SEQ ID NO: 279837 - DNA, 20 bp, synthetic construct
  source 1..20: mol_type = other DNA
gtttcaccatgttagccagt

SEQ ID NO: 279838 - DNA, 20 bp, synthetic construct
  source 1..20: mol_type = other DNA
ggtttcaccatgttagccag

SEQ ID NO: 279839 - DNA, 20 bp, synthetic construct
  source 1..20: mol_type = other DNA
gggtttcaccatgttagcca

SEQ ID NO: 279840 - DNA, 20 bp, synthetic construct
  source 1..20: mol_type = other DNA
ggggtttcaccatgttagcc

SEQ ID NO: 279841 - DNA, 20 bp, synthetic construct
  source 1..20: mol_type = other DNA
cggggtttcaccatgttagc

SEQ ID NO: 279842 - DNA, 20 bp, synthetic construct
  source 1..20: mol_type = other DNA
acggggtttcaccatgttag

SEQ ID NO: 279843 - DNA, 20 bp, synthetic construct
  source 1..20: mol_type = other DNA
gacggggtttcaccatgtta

SEQ ID NO: 279844 - DNA, 20 bp, synthetic construct
  source 1..20: mol_type = other DNA
agacggggtttcaccatgtt

SEQ ID NO: 279845 - DNA, 20 bp, synthetic construct
  source 1..20: mol_type = other DNA
gagacggggtttcaccatgt

SEQ ID NO: 279846 - DNA, 20 bp, synthetic construct
  source 1..20: mol_type = other DNA
agagacggggtttcaccatg

SEQ ID NO: 279847 - DNA, 20 bp, synthetic construct
  source 1..20: mol_type = other DNA
tagagacggggtttcaccat

SEQ ID NO: 279848 - DNA, 20 bp, synthetic construct
  source 1..20: mol_type = other DNA
gtagagacggggtttcacca

SEQ ID NO: 279849 - DNA, 20 bp, synthetic construct
  source 1..20: mol_type = other DNA
agtagagacggggtttcacc

SEQ ID NO: 279850 - DNA, 20 bp, synthetic construct
  source 1..20: mol_type = other DNA
tagtagagacggggtttcac

SEQ ID NO: 279851 - DNA, 20 bp, synthetic construct
  source 1..20: mol_type = other DNA
ttagtagagacggggtttca

SEQ ID NO: 279852 - DNA, 20 bp, synthetic construct
  source 1..20: mol_type = other DNA
tttagtagagacggggtttc

SEQ ID NO: 279853 - DNA, 20 bp, synthetic construct
  source 1..20: mol_type = other DNA
ttttagtagagacggggttt

SEQ ID NO: 279854 - DNA, 20 bp, synthetic construct
  source 1..20: mol_type = other DNA
tttttagtagagacggggtt

SEQ ID NO: 279855 - DNA, 20 bp, synthetic construct
  source 1..20: mol_type = other DNA
atttttagtagagacggggt

SEQ ID NO: 279856 - DNA, 20 bp, synthetic construct
  source 1..20: mol_type = other DNA
tatttttagtagagacgggg

SEQ ID NO: 279857 - DNA, 20 bp, synthetic construct
  source 1..20: mol_type = other DNA
gtatttttagtagagacggg

SEQ ID NO: 279858 - DNA, 20 bp, synthetic construct
  source 1..20: mol_type = other DNA
tgtatttttagtagagacgg

SEQ ID NO: 279859 - DNA, 20 bp, synthetic construct
  source 1..20: mol_type = other DNA
ttgtatttttagtagagacg

SEQ ID NO: 279860 - DNA, 20 bp, synthetic construct
  source 1..20: mol_type = other DNA
tttgtatttttagtagagac

SEQ ID NO: 279861 - DNA, 20 bp, synthetic construct
  source 1..20: mol_type = other DNA
ttttgtatttttagtagaga

SEQ ID NO: 279862 - DNA, 20 bp, synthetic construct
  source 1..20: mol_type = other DNA
tttttgtatttttagtagag

SEQ ID NO: 279863 - DNA, 20 bp, synthetic construct
  source 1..20: mol_type = other DNA
atttttgtatttttagtaga

SEQ ID NO: 279864 - DNA, 20 bp, synthetic construct
  source 1..20: mol_type = other DNA
aatttttgtatttttagtag

SEQ ID NO: 279865 - DNA, 20 bp, synthetic construct
  source 1..20: mol_type = other DNA
taatttttgtatttttagta

SEQ ID NO: 279866 - DNA, 20 bp, synthetic construct
  source 1..20: mol_type = other DNA
ctaatttttgtatttttagt

SEQ ID NO: 279867 - DNA, 20 bp, synthetic construct
  source 1..20: mol_type = other DNA
gctaatttttgtatttttag

SEQ ID NO: 279868 - DNA, 20 bp, synthetic construct
  source 1..20: mol_type = other DNA
agctaatttttgtattttta

SEQ ID NO: 279869 - DNA, 20 bp, synthetic construct
  source 1..20: mol_type = other DNA
cagctaatttttgtattttt

SEQ ID NO: 279870 - DNA, 20 bp, synthetic construct
  source 1..20: mol_type = other DNA
ccagctaatttttgtatttt

SEQ ID NO: 279871 - DNA, 20 bp, synthetic construct
  source 1..20: mol_type = other DNA
cccagctaatttttgtattt

SEQ ID NO: 279872 - DNA, 20 bp, synthetic construct
  source 1..20: mol_type = other DNA
gcccagctaatttttgtatt

SEQ ID NO: 279873 - DNA, 20 bp, synthetic construct
  source 1..20: mol_type = other DNA
tgcccagctaatttttgtat

SEQ ID NO: 279874 - DNA, 20 bp, synthetic construct
  source 1..20: mol_type = other DNA
atgcccagctaatttttgta

SEQ ID NO: 279875 - DNA, 20 bp, synthetic construct
  source 1..20: mol_type = other DNA
catgcccagctaatttttgt

SEQ ID NO: 279876 - DNA, 20 bp, synthetic construct
  source 1..20: mol_type = other DNA
ccatgcccagctaatttttg

SEQ ID NO: 279877 - DNA, 20 bp, synthetic construct
  source 1..20: mol_type = other DNA
accatgcccagctaattttt

SEQ ID NO: 279878 - DNA, 20 bp, synthetic construct
  source 1..20: mol_type = other DNA
caccatgcccagctaatttt

SEQ ID NO: 279879 - DNA, 20 bp, synthetic construct
  source 1..20: mol_type = other DNA
ccaccatgcccagctaattt

SEQ ID NO: 279880 - DNA, 20 bp, synthetic construct
  source 1..20: mol_type = other DNA
gccaccatgcccagctaatt

SEQ ID NO: 279881 - DNA, 20 bp, synthetic construct
  source 1..20: mol_type = other DNA
agccaccatgcccagctaat

SEQ ID NO: 279882 - DNA, 20 bp, synthetic construct
  source 1..20: mol_type = other DNA
gagccaccatgcccagctaa

SEQ ID NO: 279883 - DNA, 20 bp, synthetic construct
  source 1..20: mol_type = other DNA
tgagccaccatgcccagcta

SEQ ID NO: 279884 - DNA, 20 bp, synthetic construct
  source 1..20: mol_type = other DNA
gtgagccaccatgcccagct

SEQ ID NO: 279885 - DNA, 20 bp, synthetic construct
  source 1..20: mol_type = other DNA
cgtgagccaccatgcccagc

SEQ ID NO: 279886 - DNA, 20 bp, synthetic construct
  source 1..20: mol_type = other DNA
gcgtgagccaccatgcccag

SEQ ID NO: 279887 - DNA, 20 bp, synthetic construct
  source 1..20: mol_type = other DNA
ggcgtgagccaccatgccca

SEQ ID NO: 279888 - DNA, 20 bp, synthetic construct
  source 1..20: mol_type = other DNA
aggcgtgagccaccatgccc

SEQ ID NO: 279889 - DNA, 20 bp, synthetic construct
  source 1..20: mol_type = other DNA
caggcgtgagccaccatgcc

SEQ ID NO: 279890 - DNA, 20 bp, synthetic construct
  source 1..20: mol_type = other DNA
acaggcgtgagccaccatgc

SEQ ID NO: 279891 - DNA, 20 bp, synthetic construct
  source 1..20: mol_type = other DNA
tacaggcgtgagccaccatg

SEQ ID NO: 279892 - DNA, 20 bp, synthetic construct
  source 1..20: mol_type = other DNA
ttacaggcgtgagccaccat

SEQ ID NO: 279893 - DNA, 20 bp, synthetic construct
  source 1..20: mol_type = other DNA
attacaggcgtgagccacca

SEQ ID NO: 279894 - DNA, 20 bp, synthetic construct
  source 1..20: mol_type = other DNA
gattacaggcgtgagccacc

SEQ ID NO: 279895 - DNA, 20 bp, synthetic construct
  source 1..20: mol_type = other DNA
ggattacaggcgtgagccac

SEQ ID NO: 279896 - DNA, 20 bp, synthetic construct
  source 1..20: mol_type = other DNA
gggattacaggcgtgagcca

SEQ ID NO: 279897 - DNA, 20 bp, synthetic construct
  source 1..20: mol_type = other DNA
tgggattacaggcgtgagcc

SEQ ID NO: 279898 - DNA, 20 bp, synthetic construct
  source 1..20: mol_type = other DNA
ctgggattacaggcgtgagc

SEQ ID NO: 279899 - DNA, 20 bp, synthetic construct
  source 1..20: mol_type = other DNA
gctgggattacaggcgtgag

SEQ ID NO: 279900 - DNA, 20 bp, synthetic construct
  source 1..20: mol_type = other DNA
tgctgggattacaggcgtga

SEQ ID NO: 279901 - DNA, 20 bp, synthetic construct
  source 1..20: mol_type = other DNA
gtgctgggattacaggcgtg

SEQ ID NO: 279902 - DNA, 20 bp, synthetic construct
  source 1..20: mol_type = other DNA
agtgctgggattacaggcgt

SEQ ID NO: 279903 - DNA, 20 bp, synthetic construct
  source 1..20: mol_type = other DNA
aagtgctgggattacaggcg

SEQ ID NO: 279904 - DNA, 20 bp, synthetic construct
  source 1..20: mol_type = other DNA
aaagtgctgggattacaggc

SEQ ID NO: 279905 - DNA, 20 bp, synthetic construct
  source 1..20: mol_type = other DNA
caaagtgctgggattacagg

SEQ ID NO: 279906 - DNA, 20 bp, synthetic construct
  source 1..20: mol_type = other DNA
ccaaagtgctgggattacag

SEQ ID NO: 279907 - DNA, 20 bp, synthetic construct
  source 1..20: mol_type = other DNA
cccaaagtgctgggattaca

SEQ ID NO: 279908 - DNA, 20 bp, synthetic construct
  source 1..20: mol_type = other DNA
tcccaaagtgctgggattac

SEQ ID NO: 279909 - DNA, 20 bp, synthetic construct
  source 1..20: mol_type = other DNA
ctcccaaagtgctgggatta

SEQ ID NO: 279910 - DNA, 20 bp, synthetic construct
  source 1..20: mol_type = other DNA
cctcccaaagtgctgggatt

SEQ ID NO: 279911 - DNA, 20 bp, synthetic construct
  source 1..20: mol_type = other DNA
gcctcccaaagtgctgggat

SEQ ID NO: 279912 - DNA, 20 bp, synthetic construct
  source 1..20: mol_type = other DNA
ggcctcccaaagtgctggga

SEQ ID NO: 279913 - DNA, 20 bp, synthetic construct
  source 1..20: mol_type = other DNA
cggcctcccaaagtgctggg

SEQ ID NO: 279914 - DNA, 20 bp, synthetic construct
  source 1..20: mol_type = other DNA
tcggcctcccaaagtgctgg

SEQ ID NO: 279915 - DNA, 20 bp, synthetic construct
  source 1..20: mol_type = other DNA
ctcggcctcccaaagtgctg

SEQ ID NO: 279916 - DNA, 20 bp, synthetic construct
  source 1..20: mol_type = other DNA
cctcggcctcccaaagtgct

SEQ ID NO: 279917 - DNA, 20 bp, synthetic construct
  source 1..20: mol_type = other DNA
gcctcggcctcccaaagtgc

SEQ ID NO: 279918 - DNA, 20 bp, synthetic construct
  source 1..20: mol_type = other DNA
cgcctcggcctcccaaagtg

SEQ ID NO: 279919 - DNA, 20 bp, synthetic construct
  source 1..20: mol_type = other DNA
ccgcctcggcctcccaaagt

SEQ ID NO: 279920 - DNA, 20 bp, synthetic construct
  source 1..20: mol_type = other DNA
cccgcctcggcctcccaaag

SEQ ID NO: 279921 - DNA, 20 bp, synthetic construct
  source 1..20: mol_type = other DNA
gcccgcctcggcctcccaaa

SEQ ID NO: 279922 - DNA, 20 bp, synthetic construct
  source 1..20: mol_type = other DNA
ggcccgcctcggcctcccaa

SEQ ID NO: 279923 - DNA, 20 bp, synthetic construct
  source 1..20: mol_type = other DNA
cggcccgcctcggcctccca

SEQ ID NO: 279924 - DNA, 20 bp, synthetic construct
  source 1..20: mol_type = other DNA
tcggcccgcctcggcctccc

SEQ ID NO: 279925 - DNA, 20 bp, synthetic construct
  source 1..20: mol_type = other DNA
atcggcccgcctcggcctcc

SEQ ID NO: 279926 - DNA, 20 bp, synthetic construct
  source 1..20: mol_type = other DNA
gatcggcccgcctcggcctc

SEQ ID NO: 279927 - DNA, 20 bp, synthetic construct
  source 1..20: mol_type = other DNA
tgatcggcccgcctcggcct

SEQ ID NO: 279928 - DNA, 20 bp, synthetic construct
  source 1..20: mol_type = other DNA
gtgatcggcccgcctcggcc

SEQ ID NO: 279929 - DNA, 20 bp, synthetic construct
  source 1..20: mol_type = other DNA
cgtgatcggcccgcctcggc

SEQ ID NO: 279930 - DNA, 20 bp, synthetic construct
  source 1..20: mol_type = other DNA
tcgtgatcggcccgcctcgg

SEQ ID NO: 279931 - DNA, 20 bp, synthetic construct
  source 1..20: mol_type = other DNA
ctcgtgatcggcccgcctcg

SEQ ID NO: 279932 - DNA, 20 bp, synthetic construct
  source 1..20: mol_type = other DNA
cctcgtgatcggcccgcctc

SEQ ID NO: 279933 - DNA, 20 bp, synthetic construct
  source 1..20: mol_type = other DNA
acctcgtgatcggcccgcct

SEQ ID NO: 279934 - DNA, 20 bp, synthetic construct
  source 1..20: mol_type = other DNA
gacctcgtgatcggcccgcc

SEQ ID NO: 279935 - DNA, 20 bp, synthetic construct
  source 1..20: mol_type = other DNA
tgacctcgtgatcggcccgc

SEQ ID NO: 279936 - DNA, 20 bp, synthetic construct
  source 1..20: mol_type = other DNA
ctgacctcgtgatcggcccg

SEQ ID NO: 279937 - DNA, 20 bp, synthetic construct
  source 1..20: mol_type = other DNA
cctgacctcgtgatcggccc

SEQ ID NO: 279938 - DNA, 20 bp, synthetic construct
  source 1..20: mol_type = other DNA
tcctgacctcgtgatcggcc

SEQ ID NO: 279939 - DNA, 20 bp, synthetic construct
  source 1..20: mol_type = other DNA
ctcctgacctcgtgatcggc

SEQ ID NO: 279940 - DNA, 20 bp, synthetic construct
  source 1..20: mol_type = other DNA
tctcctgacctcgtgatcgg

SEQ ID NO: 279941 - DNA, 20 bp, synthetic construct
  source 1..20: mol_type = other DNA
atctcctgacctcgtgatcg

SEQ ID NO: 279942 - DNA, 20 bp, synthetic construct
  source 1..20: mol_type = other DNA
gatctcctgacctcgtgatc

SEQ ID NO: 279943 - DNA, 20 bp, synthetic construct
  source 1..20: mol_type = other DNA
cgatctcctgacctcgtgat

SEQ ID NO: 279944 - DNA, 20 bp, synthetic construct
  source 1..20: mol_type = other DNA
tcgatctcctgacctcgtga

SEQ ID NO: 279945 - DNA, 20 bp, synthetic construct
  source 1..20: mol_type = other DNA
ctcgatctcctgacctcgtg

SEQ ID NO: 279946 - DNA, 20 bp, synthetic construct
  source 1..20: mol_type = other DNA
tctcgatctcctgacctcgt

SEQ ID NO: 279947 - DNA, 20 bp, synthetic construct
  source 1..20: mol_type = other DNA
gtctcgatctcctgacctcg

SEQ ID NO: 279948 - DNA, 20 bp, synthetic construct
  source 1..20: mol_type = other DNA
ggtctcgatctcctgacctc

SEQ ID NO: 279949 - DNA, 20 bp, synthetic construct
  source 1..20: mol_type = other DNA
tggtctcgatctcctgacct

SEQ ID NO: 279950 - DNA, 20 bp, synthetic construct
  source 1..20: mol_type = other DNA
atggtctcgatctcctgacc

SEQ ID NO: 279951 - DNA, 20 bp, synthetic construct
  source 1..20: mol_type = other DNA
gatggtctcgatctcctgac

SEQ ID NO: 279952 - DNA, 20 bp, synthetic construct
  source 1..20: mol_type = other DNA
ggatggtctcgatctcctga

SEQ ID NO: 279953 - DNA, 20 bp, synthetic construct
  source 1..20: mol_type = other DNA
aggatggtctcgatctcctg

SEQ ID NO: 279954 - DNA, 20 bp, synthetic construct
  source 1..20: mol_type = other DNA
taggatggtctcgatctcct

SEQ ID NO: 279955 - DNA, 20 bp, synthetic construct
  source 1..20: mol_type = other DNA
ctaggatggtctcgatctcc

SEQ ID NO: 279956 - DNA, 20 bp, synthetic construct
  source 1..20: mol_type = other DNA
gctaggatggtctcgatctc

SEQ ID NO: 279957 - DNA, 20 bp, synthetic construct
  source 1..20: mol_type = other DNA
agctaggatggtctcgatct

SEQ ID NO: 279958 - DNA, 20 bp, synthetic construct
  source 1..20: mol_type = other DNA
tagctaggatggtctcgatc

SEQ ID NO: 279959 - DNA, 20 bp, synthetic construct
  source 1..20: mol_type = other DNA
ttagctaggatggtctcgat

SEQ ID NO: 279960 - DNA, 20 bp, synthetic construct
  source 1..20: mol_type = other DNA
gttagctaggatggtctcga

SEQ ID NO: 279961 - DNA, 20 bp, synthetic construct
  source 1..20: mol_type = other DNA
tgttagctaggatggtctcg

SEQ ID NO: 279962 - DNA, 20 bp, synthetic construct
  source 1..20: mol_type = other DNA
atgttagctaggatggtctc

SEQ ID NO: 279963 - DNA, 20 bp, synthetic construct
  source 1..20: mol_type = other DNA
catgttagctaggatggtct

SEQ ID NO: 279964 - DNA, 20 bp, synthetic construct
  source 1..20: mol_type = other DNA
ccatgttagctaggatggtc

SEQ ID NO: 279965 - DNA, 20 bp, synthetic construct
  source 1..20: mol_type = other DNA
accatgttagctaggatggt

SEQ ID NO: 279966 - DNA, 20 bp, synthetic construct
  source 1..20: mol_type = other DNA
caccatgttagctaggatgg

SEQ ID NO: 279967 - DNA, 20 bp, synthetic construct
  source 1..20: mol_type = other DNA
tcaccatgttagctaggatg

SEQ ID NO: 279968 - DNA, 20 bp, synthetic construct
  source 1..20: mol_type = other DNA
ttcaccatgttagctaggat

SEQ ID NO: 279969 - DNA, 20 bp, synthetic construct
  source 1..20: mol_type = other DNA
tttcaccatgttagctagga

SEQ ID NO: 279970 - DNA, 20 bp, synthetic construct
  source 1..20: mol_type = other DNA
gtttcaccatgttagctagg

SEQ ID NO: 279971 - DNA, 20 bp, synthetic construct
  source 1..20: mol_type = other DNA
ggtttcaccatgttagctag

SEQ ID NO: 279972 - DNA, 20 bp, synthetic construct
  source 1..20: mol_type = other DNA
gggtttcaccatgttagcta

SEQ ID NO: 279973 - DNA, 20 bp, synthetic construct
  source 1..20: mol_type = other DNA
ggggtttcaccatgttagct

SEQ ID NO: 279974 - DNA, 20 bp, synthetic construct
  source 1..20: mol_type = other DNA
cggggtttcaccatgttagc

SEQ ID NO: 279975 - DNA, 20 bp, synthetic construct
  source 1..20: mol_type = other DNA
acggggtttcaccatgttag

SEQ ID NO: 279976 - DNA, 20 bp, synthetic construct
  source 1..20: mol_type = other DNA
gacggggtttcaccatgtta

SEQ ID NO: 279977 - DNA, 20 bp, synthetic construct
  source 1..20: mol_type = other DNA
agacggggtttcaccatgtt

SEQ ID NO: 279978 - DNA, 20 bp, synthetic construct
  source 1..20: mol_type = other DNA
gagacggggtttcaccatgt

SEQ ID NO: 279979 - DNA, 20 bp, synthetic construct
  source 1..20: mol_type = other DNA
agagacggggtttcaccatg

SEQ ID NO: 279980 - DNA, 20 bp, synthetic construct
  source 1..20: mol_type = other DNA
tagagacggggtttcaccat

SEQ ID NO: 279981 - DNA, 20 bp, synthetic construct
  source 1..20: mol_type = other DNA
gtagagacggggtttcacca

SEQ ID NO: 279982 - DNA, 20 bp, synthetic construct
  source 1..20: mol_type = other DNA
agtagagacggggtttcacc

SEQ ID NO: 279983 - DNA, 20 bp, synthetic construct
  source 1..20: mol_type = other DNA
tagtagagacggggtttcac

SEQ ID NO: 279984 - DNA, 20 bp, synthetic construct
  source 1..20: mol_type = other DNA
gtagtagagacggggtttca

SEQ ID NO: 279985 - DNA, 20 bp, synthetic construct
  source 1..20: mol_type = other DNA
tgtagtagagacggggtttc

SEQ ID NO: 279986 - DNA, 20 bp, synthetic construct
  source 1..20: mol_type = other DNA
ttgtagtagagacggggttt

SEQ ID NO: 279987 - DNA, 20 bp, synthetic construct
  source 1..20: mol_type = other DNA
tttgtagtagagacggggtt

SEQ ID NO: 279988 - DNA, 20 bp, synthetic construct
  source 1..20: mol_type = other DNA
atttgtagtagagacggggt

SEQ ID NO: 279989 - DNA, 20 bp, synthetic construct
  source 1..20: mol_type = other DNA
tatttgtagtagagacgggg

SEQ ID NO: 279990 - DNA, 20 bp, synthetic construct
  source 1..20: mol_type = other DNA
gtatttgtagtagagacggg

SEQ ID NO: 279991 - DNA, 20 bp, synthetic construct
  source 1..20: mol_type = other DNA
tgtatttgtagtagagacgg

SEQ ID NO: 279992 - DNA, 20 bp, synthetic construct
  source 1..20: mol_type = other DNA
ttgtatttgtagtagagacg

SEQ ID NO: 279993 - DNA, 20 bp, synthetic construct
  source 1..20: mol_type = other DNA
tttgtatttgtagtagagac

SEQ ID NO: 279994 - DNA, 20 bp, synthetic construct
  source 1..20: mol_type = other DNA
ttttgtatttgtagtagaga

SEQ ID NO: 279995 - DNA, 20 bp, synthetic construct
  source 1..20: mol_type = other DNA
tttttgtatttgtagtagag

SEQ ID NO: 279996 - DNA, 20 bp, synthetic construct
  source 1..20: mol_type = other DNA
ttttttgtatttgtagtaga

SEQ ID NO: 279997 - DNA, 20 bp, synthetic construct
  source 1..20: mol_type = other DNA
tttttttgtatttgtagtag

SEQ ID NO: 279998 - DNA, 20 bp, synthetic construct
  source 1..20: mol_type = other DNA
ttttttttgtatttgtagta

SEQ ID NO: 279999 - DNA, 20 bp, synthetic construct
  source 1..20: mol_type = other DNA
cttttttttgtatttgtagt

SEQ ID NO: 280000 - DNA, 20 bp, synthetic construct
  source 1..20: mol_type = other DNA
tcttttttttgtatttgtag

SEQ ID NO: 280001 - DNA, 20 bp, synthetic construct
  source 1..20: mol_type = other DNA
ttcttttttttgtatttgta

SEQ ID NO: 280002 - DNA, 20 bp, synthetic construct
  source 1..20: mol_type = other DNA
tttcttttttttgtatttgt

SEQ ID NO: 280003 - DNA, 20 bp, synthetic construct
  source 1..20: mol_type = other DNA
ttttcttttttttgtatttg

SEQ ID NO: 280004 - DNA, 20 bp, synthetic construct
  source 1..20: mol_type = other DNA
tttttcttttttttgtattt

SEQ ID NO: 280005 - DNA, 20 bp, synthetic construct
  source 1..20: mol_type = other DNA
ttttttcttttttttgtatt

SEQ ID NO: 280006 - DNA, 20 bp, synthetic construct
  source 1..20: mol_type = other DNA
attttttcttttttttgtat

SEQ ID NO: 280007 - DNA, 20 bp, synthetic construct
  source 1..20: mol_type = other DNA
aattttttcttttttttgta

SEQ ID NO: 280008 - DNA, 20 bp, synthetic construct
  source 1..20: mol_type = other DNA
taattttttcttttttttgt

SEQ ID NO: 280009 - DNA, 20 bp, synthetic construct
  source 1..20: mol_type = other DNA
ctaattttttcttttttttg

SEQ ID NO: 280010 - DNA, 20 bp, synthetic construct
  source 1..20: mol_type = other DNA
gctaattttttctttttttt

SEQ ID NO: 280011 - DNA, 20 bp, synthetic construct
  source 1..20: mol_type = other DNA
ggctaattttttcttttttt

SEQ ID NO: 280012 - DNA, 20 bp, synthetic construct
  source 1..20: mol_type = other DNA
cggctaattttttctttttt

SEQ ID NO: 280013 - DNA, 20 bp, synthetic construct
  source 1..20: mol_type = other DNA
ccggctaattttttcttttt

SEQ ID NO: 280014 - DNA, 20 bp, synthetic construct
  source 1..20: mol_type = other DNA
cccggctaattttttctttt

SEQ ID NO: 280015 - DNA, 20 bp, synthetic construct
  source 1..20: mol_type = other DNA
gcccggctaattttttcttt

SEQ ID NO: 280016 - DNA, 20 bp, synthetic construct
  source 1..20: mol_type = other DNA
tgcccggctaattttttctt

SEQ ID NO: 280017 - DNA, 20 bp, synthetic construct
  source 1..20: mol_type = other DNA
atgcccggctaattttttct

SEQ ID NO: 280018 - DNA, 20 bp, synthetic construct
  source 1..20: mol_type = other DNA
catgcccggctaattttttc

SEQ ID NO: 280019 - DNA, 20 bp, synthetic construct
  source 1..20: mol_type = other DNA
ccatgcccggctaatttttt

SEQ ID NO: 280020 - DNA, 20 bp, synthetic construct
  source 1..20: mol_type = other DNA
accatgcccggctaattttt

SEQ ID NO: 280021 - DNA, 20 bp, synthetic construct
  source 1..20: mol_type = other DNA
caccatgcccggctaatttt

SEQ ID NO: 280022 - DNA, 20 bp, synthetic construct
  source 1..20: mol_type = other DNA
ccaccatgcccggctaattt

SEQ ID NO: 280023 - DNA, 20 bp, synthetic construct
  source 1..20: mol_type = other DNA
accaccatgcccggctaatt

SEQ ID NO: 280024 - DNA, 20 bp, synthetic construct
  source 1..20: mol_type = other DNA
caccaccatgcccggctaat

SEQ ID NO: 280025 - DNA, 20 bp, synthetic construct
  source 1..20: mol_type = other DNA
ccaccaccatgcccggctaa

SEQ ID NO: 280026 - DNA, 20 bp, synthetic construct
  source 1..20: mol_type = other DNA
cccaccaccatgcccggcta

SEQ ID NO: 280027 - DNA, 20 bp, synthetic construct
  source 1..20: mol_type = other DNA
gcccaccaccatgcccggct

SEQ ID NO: 280028 - DNA, 20 bp, synthetic construct
  source 1..20: mol_type = other DNA
cgcccaccaccatgcccggc

SEQ ID NO: 280029 - DNA, 20 bp, synthetic construct
  source 1..20: mol_type = other DNA
gcgcccaccaccatgcccgg

SEQ ID NO: 280030 - DNA, 20 bp, synthetic construct
  source 1..20: mol_type = other DNA
ggcgcccaccaccatgcccg

SEQ ID NO: 280031 - DNA, 20 bp, synthetic construct
  source 1..20: mol_type = other DNA
aggcgcccaccaccatgccc

SEQ ID NO: 280032 - DNA, 20 bp, synthetic construct
  source 1..20: mol_type = other DNA
caggcgcccaccaccatgcc

SEQ ID NO: 280033 - DNA, 20 bp, synthetic construct
  source 1..20: mol_type = other DNA
acaggcgcccaccaccatgc

SEQ ID NO: 280034 - DNA, 20 bp, synthetic construct
  source 1..20: mol_type = other DNA
tacaggcgcccaccaccatg

SEQ ID NO: 280035 - DNA, 20 bp, synthetic construct
  source 1..20: mol_type = other DNA
ctacaggcgcccaccaccat

SEQ ID NO: 280036 - DNA, 20 bp, synthetic construct
  source 1..20: mol_type = other DNA
actacaggcgcccaccacca

SEQ ID NO: 280037 - DNA, 20 bp, synthetic construct
  source 1..20: mol_type = other DNA
gactacaggcgcccaccacc

SEQ ID NO: 280038 - DNA, 20 bp, synthetic construct
  source 1..20: mol_type = other DNA
ggactacaggcgcccaccac

SEQ ID NO: 280039 - DNA, 20 bp, synthetic construct
  source 1..20: mol_type = other DNA
gggactacaggcgcccacca

SEQ ID NO: 280040 - DNA, 20 bp, synthetic construct
  source 1..20: mol_type = other DNA
tgggactacaggcgcccacc

SEQ ID NO: 280041 - DNA, 20 bp, synthetic construct
  source 1..20: mol_type = other DNA
ctgggactacaggcgcccac

SEQ ID NO: 280042 - DNA, 20 bp, synthetic construct
  source 1..20: mol_type = other DNA
gctgggactacaggcgccca

SEQ ID NO: 280043 - DNA, 20 bp, synthetic construct
  source 1..20: mol_type = other DNA
agctgggactacaggcgccc

SEQ ID NO: 280044 - DNA, 20 bp, synthetic construct
  source 1..20: mol_type = other DNA
tagctgggactacaggcgcc

SEQ ID NO: 280045 - DNA, 20 bp, synthetic construct
  source 1..20: mol_type = other DNA
gtagctgggactacaggcgc

SEQ ID NO: 280046 - DNA, 20 bp, synthetic construct
  source 1..20: mol_type = other DNA
agtagctgggactacaggcg

SEQ ID NO: 280047 - DNA, 20 bp, synthetic construct
  source 1..20: mol_type = other DNA
gagtagctgggactacaggc

SEQ ID NO: 280048 - DNA, 20 bp, synthetic construct
  source 1..20: mol_type = other DNA
cgagtagctgggactacagg

SEQ ID NO: 280049 - DNA, 20 bp, synthetic construct
  source 1..20: mol_type = other DNA
ccgagtagctgggactacag

SEQ ID NO: 280050 - DNA, 20 bp, synthetic construct
  source 1..20: mol_type = other DNA
cccgagtagctgggactaca

SEQ ID NO: 280051 - DNA, 20 bp, synthetic construct
  source 1..20: mol_type = other DNA
tcccgagtagctgggactac

SEQ ID NO: 280052 - DNA, 20 bp, synthetic construct
  source 1..20: mol_type = other DNA
ctcccgagtagctgggacta

SEQ ID NO: 280053 - DNA, 20 bp, synthetic construct
  source 1..20: mol_type = other DNA
cctcccgagtagctgggact

SEQ ID NO: 280054 - DNA, 20 bp, synthetic construct
  source 1..20: mol_type = other DNA
gcctcccgagtagctgggac

SEQ ID NO: 280055 - DNA, 20 bp, synthetic construct
  source 1..20: mol_type = other DNA
agcctcccgagtagctggga

SEQ ID NO: 280056 - DNA, 20 bp, synthetic construct
  source 1..20: mol_type = other DNA
cagcctcccgagtagctggg

SEQ ID NO: 280057 - DNA, 20 bp, synthetic construct
  source 1..20: mol_type = other DNA
tcagcctcccgagtagctgg

SEQ ID NO: 280058 - DNA, 20 bp, synthetic construct
  source 1..20: mol_type = other DNA
ctcagcctcccgagtagctg

SEQ ID NO: 280059 - DNA, 20 bp, synthetic construct
  source 1..20: mol_type = other DNA
cctcagcctcccgagtagct

SEQ ID NO: 280060 - DNA, 20 bp, synthetic construct
  source 1..20: mol_type = other DNA
gcctcagcctcccgagtagc

SEQ ID NO: 280061 - DNA, 20 bp, synthetic construct
  source 1..20: mol_type = other DNA
tgcctcagcctcccgagtag

SEQ ID NO: 280062 - DNA, 20 bp, synthetic construct
  source 1..20: mol_type = other DNA
ctgcctcagcctcccgagta

SEQ ID NO: 280063 - DNA, 20 bp, synthetic construct
  source 1..20: mol_type = other DNA
cctgcctcagcctcccgagt

SEQ ID NO: 280064 - DNA, 20 bp, synthetic construct
  source 1..20: mol_type = other DNA
tcctgcctcagcctcccgag

SEQ ID NO: 280065 - DNA, 20 bp, synthetic construct
  source 1..20: mol_type = other DNA
ctcctgcctcagcctcccga

SEQ ID NO: 280066 - DNA, 20 bp, synthetic construct
  source 1..20: mol_type = other DNA
tctcctgcctcagcctcccg

SEQ ID NO: 280067 - DNA, 20 bp, synthetic construct
  source 1..20: mol_type = other DNA
ttctcctgcctcagcctccc

SEQ ID NO: 280068 - DNA, 20 bp, synthetic construct
  source 1..20: mol_type = other DNA
attctcctgcctcagcctcc

SEQ ID NO: 280069 - DNA, 20 bp, synthetic construct
  source 1..20: mol_type = other DNA
cattctcctgcctcagcctc

SEQ ID NO: 280070 - DNA, 20 bp, synthetic construct
  source 1..20: mol_type = other DNA
ccattctcctgcctcagcct

SEQ ID NO: 280071 - DNA, 20 bp, synthetic construct
  source 1..20: mol_type = other DNA
gccattctcctgcctcagcc

SEQ ID NO: 280072 - DNA, 20 bp, synthetic construct
  source 1..20: mol_type = other DNA
cgccattctcctgcctcagc

SEQ ID NO: 280073 - DNA, 20 bp, synthetic construct
  source 1..20: mol_type = other DNA
acgccattctcctgcctcag

SEQ ID NO: 280074 - DNA, 20 bp, synthetic construct
  source 1..20: mol_type = other DNA
cacgccattctcctgcctca

SEQ ID NO: 280075 - DNA, 20 bp, synthetic construct
  source 1..20: mol_type = other DNA
tcacgccattctcctgcctc

SEQ ID NO: 280076 - DNA, 20 bp, synthetic construct
  source 1..20: mol_type = other DNA
ttcacgccattctcctgcct

SEQ ID NO: 280077 - DNA, 20 bp, synthetic construct
  source 1..20: mol_type = other DNA
gttcacgccattctcctgcc

SEQ ID NO: 280078 - DNA, 20 bp, synthetic construct
  source 1..20: mol_type = other DNA
ggttcacgccattctcctgc

SEQ ID NO: 280079 - DNA, 20 bp, synthetic construct
  source 1..20: mol_type = other DNA
gggttcacgccattctcctg

SEQ ID NO: 280080 - DNA, 20 bp, synthetic construct
  source 1..20: mol_type = other DNA
cgggttcacgccattctcct

SEQ ID NO: 280081 - DNA, 20 bp, synthetic construct
  source 1..20: mol_type = other DNA
ccgggttcacgccattctcc

SEQ ID NO: 280082 - DNA, 20 bp, synthetic construct
  source 1..20: mol_type = other DNA
cccgggttcacgccattctc

SEQ ID NO: 280083 - DNA, 20 bp, synthetic construct
  source 1..20: mol_type = other DNA
tcccgggttcacgccattct

SEQ ID NO: 280084 - DNA, 20 bp, synthetic construct
  source 1..20: mol_type = other DNA
ctcccgggttcacgccattc

SEQ ID NO: 280085 - DNA, 20 bp, synthetic construct
  source 1..20: mol_type = other DNA
cctcccgggttcacgccatt

SEQ ID NO: 280086 - DNA, 20 bp, synthetic construct
  source 1..20: mol_type = other DNA
gcctcccgggttcacgccat

SEQ ID NO: 280087 - DNA, 20 bp, synthetic construct
  source 1..20: mol_type = other DNA
cgcctcccgggttcacgcca

SEQ ID NO: 280088 - DNA, 20 bp, synthetic construct
  source 1..20: mol_type = other DNA
ccgcctcccgggttcacgcc

SEQ ID NO: 280089 - DNA, 20 bp, synthetic construct
  source 1..20: mol_type = other DNA
tccgcctcccgggttcacgc

SEQ ID NO: 280090 - DNA, 20 bp, synthetic construct
  source 1..20: mol_type = other DNA
ctccgcctcccgggttcacg

SEQ ID NO: 280091 - DNA, 20 bp, synthetic construct
  source 1..20: mol_type = other DNA
gctccgcctcccgggttcac

SEQ ID NO: 280092 - DNA, 20 bp, synthetic construct
  source 1..20: mol_type = other DNA
agctccgcctcccgggttca

SEQ ID NO: 280093 - DNA, 20 bp, synthetic construct
  source 1..20: mol_type = other DNA
aagctccgcctcccgggttc

SEQ ID NO: 280094 - DNA, 20 bp, synthetic construct
  source 1..20: mol_type = other DNA
caagctccgcctcccgggtt

SEQ ID NO: 280095 - DNA, 20 bp, synthetic construct
  source 1..20: mol_type = other DNA
gcaagctccgcctcccgggt

SEQ ID NO: 280096 - DNA, 20 bp, synthetic construct
  source 1..20: mol_type = other DNA
tgcaagctccgcctcccggg

SEQ ID NO: 280097 - DNA, 20 bp, synthetic construct
  source 1..20: mol_type = other DNA
ctgcaagctccgcctcccgg

SEQ ID NO: 280098 - DNA, 20 bp, synthetic construct
  source 1..20: mol_type = other DNA
actgcaagctccgcctcccg

SEQ ID NO: 280099 - DNA, 20 bp, synthetic construct
  source 1..20: mol_type = other DNA
cactgcaagctccgcctccc

SEQ ID NO: 280100 - DNA, 20 bp, synthetic construct
  source 1..20: mol_type = other DNA
tcactgcaagctccgcctcc

SEQ ID NO: 280101 - DNA, 20 bp, synthetic construct
  source 1..20: mol_type = other DNA
ctcactgcaagctccgcctc

SEQ ID NO: 280102 - DNA, 20 bp, synthetic construct
  source 1..20: mol_type = other DNA
gctcactgcaagctccgcct

SEQ ID NO: 280103 - DNA, 20 bp, synthetic construct
  source 1..20: mol_type = other DNA
ggctcactgcaagctccgcc

SEQ ID NO: 280104 - DNA, 20 bp, synthetic construct
  source 1..20: mol_type = other DNA
cggctcactgcaagctccgc

SEQ ID NO: 280105 - DNA, 20 bp, synthetic construct
  source 1..20: mol_type = other DNA
tcggctcactgcaagctccg

SEQ ID NO: 280106 - DNA, 20 bp, synthetic construct
  source 1..20: mol_type = other DNA
ctcggctcactgcaagctcc

SEQ ID NO: 280107 - DNA, 20 bp, synthetic construct
  source 1..20: mol_type = other DNA
tctcggctcactgcaagctc

SEQ ID NO: 280108 - DNA, 20 bp, synthetic construct
  source 1..20: mol_type = other DNA
atctcggctcactgcaagct

SEQ ID NO: 280109 - DNA, 20 bp, synthetic construct
  source 1..20: mol_type = other DNA
gatctcggctcactgcaagc

SEQ ID NO: 280110 - DNA, 20 bp, synthetic construct
  source 1..20: mol_type = other DNA
cgatctcggctcactgcaag

SEQ ID NO: 280111 - DNA, 20 bp, synthetic construct
  source 1..20: mol_type = other DNA
gcgatctcggctcactgcaa

SEQ ID NO: 280112 - DNA, 20 bp, synthetic construct
  source 1..20: mol_type = other DNA
cgcgatctcggctcactgca

SEQ ID NO: 280113 - DNA, 20 bp, synthetic construct
  source 1..20: mol_type = other DNA
gcgcgatctcggctcactgc

SEQ ID NO: 280114 - DNA, 20 bp, synthetic construct
  source 1..20: mol_type = other DNA
ggcgcgatctcggctcactg

SEQ ID NO: 280115 - DNA, 20 bp, synthetic construct
  source 1..20: mol_type = other DNA
tggcgcgatctcggctcact

SEQ ID NO: 280116 - DNA, 20 bp, synthetic construct
  source 1..20: mol_type = other DNA
gtggcgcgatctcggctcac

SEQ ID NO: 280117 - DNA, 20 bp, synthetic construct
  source 1..20: mol_type = other DNA
agtggcgcgatctcggctca

SEQ ID NO: 280118 - DNA, 20 bp, synthetic construct
  source 1..20: mol_type = other DNA
cagtggcgcgatctcggctc

SEQ ID NO: 280119 - DNA, 20 bp, synthetic construct
  source 1..20: mol_type = other DNA
gcagtggcgcgatctcggct

SEQ ID NO: 280120 - DNA, 20 bp, synthetic construct
  source 1..20: mol_type = other DNA
tgcagtggcgcgatctcggc

SEQ ID NO: 280121 - DNA, 20 bp, synthetic construct
  source 1..20: mol_type = other DNA
gtgcagtggcgcgatctcgg

SEQ ID NO: 280122 - DNA, 20 bp, synthetic construct
  source 1..20: mol_type = other DNA
agtgcagtggcgcgatctcg

SEQ ID NO: 280123 - DNA, 20 bp, synthetic construct
  source 1..20: mol_type = other DNA
gagtgcagtggcgcgatctc

SEQ ID NO: 280124 - DNA, 20 bp, synthetic construct
  source 1..20: mol_type = other DNA
ggagtgcagtggcgcgatct

SEQ ID NO: 280125 - DNA, 20 bp, synthetic construct
  source 1..20: mol_type = other DNA
tggagtgcagtggcgcgatc

SEQ ID NO: 280126 - DNA, 20 bp, synthetic construct
  source 1..20: mol_type = other DNA
ctggagtgcagtggcgcgat

SEQ ID NO: 280127 - DNA, 20 bp, synthetic construct
  source 1..20: mol_type = other DNA
gctggagtgcagtggcgcga

SEQ ID NO: 280128 - DNA, 20 bp, synthetic construct
  source 1..20: mol_type = other DNA
ggctggagtgcagtggcgcg

SEQ ID NO: 280129 - DNA, 20 bp, synthetic construct
  source 1..20: mol_type = other DNA
aggctggagtgcagtggcgc

SEQ ID NO: 280130 - DNA, 20 bp, synthetic construct
  source 1..20: mol_type = other DNA
caggctggagtgcagtggcg

SEQ ID NO: 280131 - DNA, 20 bp, synthetic construct
  source 1..20: mol_type = other DNA
ccaggctggagtgcagtggc

SEQ ID NO: 280132 - DNA, 20 bp, synthetic construct
  source 1..20: mol_type = other DNA
cccaggctggagtgcagtgg

SEQ ID NO: 280133 - DNA, 20 bp, synthetic construct
  source 1..20: mol_type = other DNA
gcccaggctggagtgcagtg

SEQ ID NO: 280134 - DNA, 20 bp, synthetic construct
  source 1..20: mol_type = other DNA
cgcccaggctggagtgcagt

SEQ ID NO: 280135 - DNA, 20 bp, synthetic construct
  source 1..20: mol_type = other DNA
tcgcccaggctggagtgcag

SEQ ID NO: 280136 - DNA, 20 bp, synthetic construct
  source 1..20: mol_type = other DNA
gtcgcccaggctggagtgca

SEQ ID NO: 280137 - DNA, 20 bp, synthetic construct
  source 1..20: mol_type = other DNA
tgtcgcccaggctggagtgc

SEQ ID NO: 280138 - DNA, 20 bp, synthetic construct
  source 1..20: mol_type = other DNA
ttgtcgcccaggctggagtg

SEQ ID NO: 280139 - DNA, 20 bp, synthetic construct
  source 1..20: mol_type = other DNA
cttgtcgcccaggctggagt

SEQ ID NO: 280140 - DNA, 20 bp, synthetic construct
  source 1..20: mol_type = other DNA
ccttgtcgcccaggctggag

SEQ ID NO: 280141 - DNA, 20 bp, synthetic construct
  source 1..20: mol_type = other DNA
gccttgtcgcccaggctgga

SEQ ID NO: 280142 - DNA, 20 bp, synthetic construct
  source 1..20: mol_type = other DNA
tgccttgtcgcccaggctgg

SEQ ID NO: 280143 - DNA, 20 bp, synthetic construct
  source 1..20: mol_type = other DNA
ttgccttgtcgcccaggctg

SEQ ID NO: 280144 - DNA, 20 bp, synthetic construct
  source 1..20: mol_type = other DNA
cttgccttgtcgcccaggct

SEQ ID NO: 280145 - DNA, 20 bp, synthetic construct
  source 1..20: mol_type = other DNA
tcttgccttgtcgcccaggc

SEQ ID NO: 280146 - DNA, 20 bp, synthetic construct
  source 1..20: mol_type = other DNA
atcttgccttgtcgcccagg

SEQ ID NO: 280147 - DNA, 20 bp, synthetic construct
  source 1..20: mol_type = other DNA
aatcttgccttgtcgcccag

SEQ ID NO: 280148 - DNA, 20 bp, synthetic construct
  source 1..20: mol_type = other DNA
gaatcttgccttgtcgccca

SEQ ID NO: 280149 - DNA, 20 bp, synthetic construct
  source 1..20: mol_type = other DNA
agaatcttgccttgtcgccc

SEQ ID NO: 280150 - DNA, 20 bp, synthetic construct
  source 1..20: mol_type = other DNA
tagaatcttgccttgtcgcc

SEQ ID NO: 280151 - DNA, 20 bp, synthetic construct
  source 1..20: mol_type = other DNA
atagaatcttgccttgtcgc

SEQ ID NO: 280152 - DNA, 20 bp, synthetic construct
  source 1..20: mol_type = other DNA
gatagaatcttgccttgtcg

SEQ ID NO: 280153 - DNA, 20 bp, synthetic construct
  source 1..20: mol_type = other DNA
agatagaatcttgccttgtc

SEQ ID NO: 280154 - DNA, 20 bp, synthetic construct
  source 1..20: mol_type = other DNA
gagatagaatcttgccttgt

SEQ ID NO: 280155 - DNA, 20 bp, synthetic construct
  source 1..20: mol_type = other DNA
tgagatagaatcttgccttg

SEQ ID NO: 280156 - DNA, 20 bp, synthetic construct
  source 1..20: mol_type = other DNA
ttgagatagaatcttgcctt

SEQ ID NO: 280157 - DNA, 20 bp, synthetic construct
  source 1..20: mol_type = other DNA
tttgagatagaatcttgcct

SEQ ID NO: 280158 - DNA, 20 bp, synthetic construct
  source 1..20: mol_type = other DNA
ttttgagatagaatcttgcc

SEQ ID NO: 280159 - DNA, 20 bp, synthetic construct
  source 1..20: mol_type = other DNA
tttttgagatagaatcttgc

SEQ ID NO: 280160 - DNA, 20 bp, synthetic construct
  source 1..20: mol_type = other DNA
ttttttgagatagaatcttg

SEQ ID NO: 280161 - DNA, 20 bp, synthetic construct
  source 1..20: mol_type = other DNA
tttttttgagatagaatctt

SEQ ID NO: 280162 - DNA, 20 bp, synthetic construct
  source 1..20: mol_type = other DNA
atttttttgagatagaatct

SEQ ID NO: 280163 - DNA, 20 bp, synthetic construct
  source 1..20: mol_type = other DNA
tatttttttgagatagaatc

SEQ ID NO: 280164 - DNA, 20 bp, synthetic construct
  source 1..20: mol_type = other DNA
ttatttttttgagatagaat

SEQ ID NO: 280165 - DNA, 20 bp, synthetic construct
  source 1..20: mol_type = other DNA
tttatttttttgagatagaa

SEQ ID NO: 280166 - DNA, 20 bp, synthetic construct
  source 1..20: mol_type = other DNA
ttttatttttttgagataga

SEQ ID NO: 280167 - DNA, 20 bp, synthetic construct
  source 1..20: mol_type = other DNA
tttttatttttttgagatag

SEQ ID NO: 280168 - DNA, 20 bp, synthetic construct
  source 1..20: mol_type = other DNA
atttttatttttttgagata

SEQ ID NO: 280169 - DNA, 20 bp, synthetic construct
  source 1..20: mol_type = other DNA
tatttttatttttttgagat

SEQ ID NO: 280170 - DNA, 20 bp, synthetic construct
  source 1..20: mol_type = other DNA
ttatttttatttttttgaga

SEQ ID NO: 280171 - DNA, 20 bp, synthetic construct
  source 1..20: mol_type = other DNA
tttatttttatttttttgag

SEQ ID NO: 280172 - DNA, 20 bp, synthetic construct
  source 1..20: mol_type = other DNA
ttttatttttatttttttga

SEQ ID NO: 280173 - DNA, 20 bp, synthetic construct
  source 1..20: mol_type = other DNA
attttatttttatttttttg

SEQ ID NO: 280174 - DNA, 20 bp, synthetic construct
  source 1..20: mol_type = other DNA
tattttatttttattttttt

SEQ ID NO: 280175 - DNA, 20 bp, synthetic construct
  source 1..20: mol_type = other DNA
ttattttatttttatttttt

SEQ ID NO: 280176 - DNA, 20 bp, synthetic construct
  source 1..20: mol_type = other DNA
tttattttatttttattttt

SEQ ID NO: 280177 - DNA, 20 bp, synthetic construct
  source 1..20: mol_type = other DNA
ttttattttatttttatttt

SEQ ID NO: 280178 - DNA, 20 bp, synthetic construct
  source 1..20: mol_type = other DNA
attttattttatttttattt

SEQ ID NO: 280179 - DNA, 20 bp, synthetic construct
  source 1..20: mol_type = other DNA
tattttattttatttttatt

SEQ ID NO: 280180 - DNA, 20 bp, synthetic construct
  source 1..20: mol_type = other DNA
ttattttattttatttttat

SEQ ID NO: 280181 - DNA, 20 bp, synthetic construct
  source 1..20: mol_type = other DNA
tttattttattttattttta

SEQ ID NO: 280182 - DNA, 20 bp, synthetic construct
  source 1..20: mol_type = other DNA
ttttattttattttattttt

SEQ ID NO: 280183 - DNA, 20 bp, synthetic construct
  source 1..20: mol_type = other DNA
attttattttattttatttt

SEQ ID NO: 280184 - DNA, 20 bp, synthetic construct
  source 1..20: mol_type = other DNA
tattttattttattttattt

SEQ ID NO: 280185 - DNA, 20 bp, synthetic construct
  source 1..20: mol_type = other DNA
ttattttattttattttatt

SEQ ID NO: 280186 - DNA, 20 bp, synthetic construct
  source 1..20: mol_type = other DNA
attattttattttattttat

SEQ ID NO: 280187 - DNA, 20 bp, synthetic construct
  source 1..20: mol_type = other DNA
tattattttattttatttta

SEQ ID NO: 280188 - DNA, 20 bp, synthetic construct
  source 1..20: mol_type = other DNA
ttattattttattttatttt

SEQ ID NO: 280189 - DNA, 20 bp, synthetic construct
  source 1..20: mol_type = other DNA
tttattattttattttattt

SEQ ID NO: 280190 - DNA, 20 bp, synthetic construct
  source 1..20: mol_type = other DNA
ttttattattttattttatt

SEQ ID NO: 280191 - DNA, 20 bp, synthetic construct
  source 1..20: mol_type = other DNA
attttattattttattttat

SEQ ID NO: 280192 - DNA, 20 bp, synthetic construct
  source 1..20: mol_type = other DNA
tattttattattttatttta

SEQ ID NO: 280193 - DNA, 20 bp, synthetic construct
  source 1..20: mol_type = other DNA
ttattttattattttatttt

SEQ ID NO: 280194 - DNA, 20 bp, synthetic construct
  source 1..20: mol_type = other DNA
tttattttattattttattt

SEQ ID NO: 280195 - DNA, 20 bp, synthetic construct
  source 1..20: mol_type = other DNA
ttttattttattattttatt

SEQ ID NO: 280196 - DNA, 20 bp, synthetic construct
  source 1..20: mol_type = other DNA
attttattttattattttat

SEQ ID NO: 280197 - DNA, 20 bp, synthetic construct
  source 1..20: mol_type = other DNA
tattttattttattatttta

SEQ ID NO: 280198 - DNA, 20 bp, synthetic construct
  source 1..20: mol_type = other DNA
ttattttattttattatttt

SEQ ID NO: 280199 - DNA, 20 bp, synthetic construct
  source 1..20: mol_type = other DNA
tttattttattttattattt

SEQ ID NO: 280200 - DNA, 20 bp, synthetic construct
  source 1..20: mol_type = other DNA
ttttattttattttattatt

SEQ ID NO: 280201 - DNA, 20 bp, synthetic construct
  source 1..20: mol_type = other DNA
attttattttattttattat

SEQ ID NO: 280202 - DNA, 20 bp, synthetic construct
  source 1..20: mol_type = other DNA
tattttattttattttatta

SEQ ID NO: 280203 - DNA, 20 bp, synthetic construct
  source 1..20: mol_type = other DNA
ttattttattttattttatt

SEQ ID NO: 280204 - DNA, 20 bp, synthetic construct
  source 1..20: mol_type = other DNA
tttattttattttattttat

SEQ ID NO: 280205 - DNA, 20 bp, synthetic construct
  source 1..20: mol_type = other DNA
ttttattttattttatttta

SEQ ID NO: 280206 - DNA, 20 bp, synthetic construct
  source 1..20: mol_type = other DNA
attttattttattttatttt

SEQ ID NO: 280207 - DNA, 20 bp, synthetic construct
  source 1..20: mol_type = other DNA
tattttattttattttattt

SEQ ID NO: 280208 - DNA, 20 bp, synthetic construct
  source 1..20: mol_type = other DNA
ttattttattttattttatt

SEQ ID NO: 280209 - DNA, 20 bp, synthetic construct
  source 1..20: mol_type = other DNA
tttattttattttattttat

SEQ ID NO: 280210 - DNA, 20 bp, synthetic construct
  source 1..20: mol_type = other DNA
ttttattttattttatttta

SEQ ID NO: 280211 - DNA, 20 bp, synthetic construct
  source 1..20: mol_type = other DNA
attttattttattttatttt

SEQ ID NO: 280212 - DNA, 20 bp, synthetic construct
  source 1..20: mol_type = other DNA
tattttattttattttattt

SEQ ID NO: 280213 - DNA, 20 bp, synthetic construct
  source 1..20: mol_type = other DNA
ttattttattttattttatt

SEQ ID NO: 280214 - DNA, 20 bp, synthetic construct
  source 1..20: mol_type = other DNA
tttattttattttattttat

SEQ ID NO: 280215 - DNA, 20 bp, synthetic construct
  source 1..20: mol_type = other DNA
atttattttattttatttta

SEQ ID NO: 280216 - DNA, 20 bp, synthetic construct
  source 1..20: mol_type = other DNA
tatttattttattttatttt

SEQ ID NO: 280217 - DNA, 20 bp, synthetic construct
  source 1..20: mol_type = other DNA
ttatttattttattttattt

SEQ ID NO: 280218 - DNA, 20 bp, synthetic construct
  source 1..20: mol_type = other DNA
tttatttattttattttatt

SEQ ID NO: 280219 - DNA, 20 bp, synthetic construct
  source 1..20: mol_type = other DNA
ttttatttattttattttat

SEQ ID NO: 280220 - DNA, 20 bp, synthetic construct
  source 1..20: mol_type = other DNA
attttatttattttatttta

SEQ ID NO: 280221 - DNA, 20 bp, synthetic construct
  source 1..20: mol_type = other DNA
tattttatttattttatttt

SEQ ID NO: 280222 - DNA, 20 bp, synthetic construct
  source 1..20: mol_type = other DNA
ttattttatttattttattt

SEQ ID NO: 280223 - DNA, 20 bp, synthetic construct
  source 1..20: mol_type = other DNA
tttattttatttattttatt

SEQ ID NO: 280224 - DNA, 20 bp, synthetic construct
  source 1..20: mol_type = other DNA
ttttattttatttattttat

SEQ ID NO: 280225 - DNA, 20 bp, synthetic construct
  source 1..20: mol_type = other DNA
attttattttatttatttta

SEQ ID NO: 280226 - DNA, 20 bp, synthetic construct
  source 1..20: mol_type = other DNA
tattttattttatttatttt

SEQ ID NO: 280227 - DNA, 20 bp, synthetic construct
  source 1..20: mol_type = other DNA
ttattttattttatttattt

SEQ ID NO: 280228 - DNA, 20 bp, synthetic construct
  source 1..20: mol_type = other DNA
tttattttattttatttatt

SEQ ID NO: 280229 - DNA, 20 bp, synthetic construct
  source 1..20: mol_type = other DNA
ttttattttattttatttat

SEQ ID NO: 280230 - DNA, 20 bp, synthetic construct
  source 1..20: mol_type = other DNA
attttattttattttattta

SEQ ID NO: 280231 - DNA, 20 bp, synthetic construct
  source 1..20: mol_type = other DNA
cattttattttattttattt

SEQ ID NO: 280232 - DNA, 20 bp, synthetic construct
  source 1..20: mol_type = other DNA
acattttattttattttatt

SEQ ID NO: 280233 - DNA, 20 bp, synthetic construct
  source 1..20: mol_type = other DNA
tacattttattttattttat

SEQ ID NO: 280234 - DNA, 20 bp, synthetic construct
  source 1..20: mol_type = other DNA
atacattttattttatttta

SEQ ID NO: 280235 - DNA, 20 bp, synthetic construct
  source 1..20: mol_type = other DNA
tatacattttattttatttt

SEQ ID NO: 280236 - DNA, 20 bp, synthetic construct
  source 1..20: mol_type = other DNA
ttatacattttattttattt

SEQ ID NO: 280237 - DNA, 20 bp, synthetic construct
  source 1..20: mol_type = other DNA
attatacattttattttatt

SEQ ID NO: 280238 - DNA, 20 bp, synthetic construct
  source 1..20: mol_type = other DNA
aattatacattttattttat

SEQ ID NO: 280239 - DNA, 20 bp, synthetic construct
  source 1..20: mol_type = other DNA
caattatacattttatttta

SEQ ID NO: 280240 - DNA, 20 bp, synthetic construct
  source 1..20: mol_type = other DNA
ccaattatacattttatttt

SEQ ID NO: 280241 - DNA, 20 bp, synthetic construct
  source 1..20: mol_type = other DNA
tccaattatacattttattt

SEQ ID NO: 280242 - DNA, 20 bp, synthetic construct
  source 1..20: mol_type = other DNA
ttccaattatacattttatt

SEQ ID NO: 280243 - DNA, 20 bp, synthetic construct
  source 1..20: mol_type = other DNA
attccaattatacattttat

SEQ ID NO: 280244 - DNA, 20 bp, synthetic construct
  source 1..20: mol_type = other DNA
cattccaattatacatttta

SEQ ID NO: 280245 - DNA, 20 bp, synthetic construct
  source 1..20: mol_type = other DNA
acattccaattatacatttt

SEQ ID NO: 280246 - DNA, 20 bp, synthetic construct
  source 1..20: mol_type = other DNA
aacattccaattatacattt

SEQ ID NO: 280247 - DNA, 20 bp, synthetic construct
  source 1..20: mol_type = other DNA
aaacattccaattatacatt

SEQ ID NO: 280248 - DNA, 20 bp, synthetic construct
  source 1..20: mol_type = other DNA
taaacattccaattatacat

SEQ ID NO: 280249 - DNA, 20 bp, synthetic construct
  source 1..20: mol_type = other DNA
ataaacattccaattataca

SEQ ID NO: 280250 - DNA, 20 bp, synthetic construct
  source 1..20: mol_type = other DNA
tataaacattccaattatac

SEQ ID NO: 280251 - DNA, 20 bp, synthetic construct
  source 1..20: mol_type = other DNA
ttataaacattccaattata

SEQ ID NO: 280252 - DNA, 20 bp, synthetic construct
  source 1..20: mol_type = other DNA
gttataaacattccaattat

SEQ ID NO: 280253 - DNA, 20 bp, synthetic construct
  source 1..20: mol_type = other DNA
tgttataaacattccaatta

SEQ ID NO: 280254 - DNA, 20 bp, synthetic construct
  source 1..20: mol_type = other DNA
gtgttataaacattccaatt

SEQ ID NO: 280255 - DNA, 20 bp, synthetic construct
  source 1..20: mol_type = other DNA
tgtgttataaacattccaat

SEQ ID NO: 280256 - DNA, 20 bp, synthetic construct
  source 1..20: mol_type = other DNA
ttgtgttataaacattccaa

SEQ ID NO: 280257 - DNA, 20 bp, synthetic construct
  source 1..20: mol_type = other DNA
cttgtgttataaacattcca

SEQ ID NO: 280258 - DNA, 20 bp, synthetic construct
  source 1..20: mol_type = other DNA
tcttgtgttataaacattcc

SEQ ID NO: 280259 - DNA, 20 bp, synthetic construct
  source 1..20: mol_type = other DNA
ttcttgtgttataaacattc

SEQ ID NO: 280260 - DNA, 20 bp, synthetic construct
  source 1..20: mol_type = other DNA
tttcttgtgttataaacatt

SEQ ID NO: 280261 - DNA, 20 bp, synthetic construct
  source 1..20: mol_type = other DNA
atttcttgtgttataaacat

SEQ ID NO: 280262 - DNA, 20 bp, synthetic construct
  source 1..20: mol_type = other DNA
catttcttgtgttataaaca

SEQ ID NO: 280263 - DNA, 20 bp, synthetic construct
  source 1..20: mol_type = other DNA
tcatttcttgtgttataaac

SEQ ID NO: 280264 - DNA, 20 bp, synthetic construct
  source 1..20: mol_type = other DNA
atcatttcttgtgttataaa

SEQ ID NO: 280265 - DNA, 20 bp, synthetic construct
  source 1..20: mol_type = other DNA
tatcatttcttgtgttataa

SEQ ID NO: 280266 - DNA, 20 bp, synthetic construct
  source 1..20: mol_type = other DNA
ttatcatttcttgtgttata

SEQ ID NO: 280267 - DNA, 20 bp, synthetic construct
  source 1..20: mol_type = other DNA
tttatcatttcttgtgttat

SEQ ID NO: 280268 - DNA, 20 bp, synthetic construct
  source 1..20: mol_type = other DNA
atttatcatttcttgtgtta

SEQ ID NO: 280269 - DNA, 20 bp, synthetic construct
  source 1..20: mol_type = other DNA
catttatcatttcttgtgtt

SEQ ID NO: 280270 - DNA, 20 bp, synthetic construct
  source 1..20: mol_type = other DNA
gcatttatcatttcttgtgt

SEQ ID NO: 280271 - DNA, 20 bp, synthetic construct
  source 1..20: mol_type = other DNA
agcatttatcatttcttgtg

SEQ ID NO: 280272 - DNA, 20 bp, synthetic construct
  source 1..20: mol_type = other DNA
aagcatttatcatttcttgt

SEQ ID NO: 280273 - DNA, 20 bp, synthetic construct
  source 1..20: mol_type = other DNA
caagcatttatcatttcttg

SEQ ID NO: 280274 - DNA, 20 bp, synthetic construct
  source 1..20: mol_type = other DNA
tcaagcatttatcatttctt

SEQ ID NO: 280275 - DNA, 20 bp, synthetic construct
  source 1..20: mol_type = other DNA
ctcaagcatttatcatttct

SEQ ID NO: 280276 - DNA, 20 bp, synthetic construct
  source 1..20: mol_type = other DNA
cctcaagcatttatcatttc

SEQ ID NO: 280277 - DNA, 20 bp, synthetic construct
  source 1..20: mol_type = other DNA
acctcaagcatttatcattt

SEQ ID NO: 280278 - DNA, 20 bp, synthetic construct
  source 1..20: mol_type = other DNA
cacctcaagcatttatcatt

SEQ ID NO: 280279 - DNA, 20 bp, synthetic construct
  source 1..20: mol_type = other DNA
tcacctcaagcatttatcat

SEQ ID NO: 280280 - DNA, 20 bp, synthetic construct
  source 1..20: mol_type = other DNA
atcacctcaagcatttatca

SEQ ID NO: 280281 - DNA, 20 bp, synthetic construct
  source 1..20: mol_type = other DNA
tatcacctcaagcatttatc

SEQ ID NO: 280282 - DNA, 20 bp, synthetic construct
  source 1..20: mol_type = other DNA
ctatcacctcaagcatttat

SEQ ID NO: 280283 - DNA, 20 bp, synthetic construct
  source 1..20: mol_type = other DNA
tctatcacctcaagcattta

SEQ ID NO: 280284 - DNA, 20 bp, synthetic construct
  source 1..20: mol_type = other DNA
atctatcacctcaagcattt

SEQ ID NO: 280285 - DNA, 20 bp, synthetic construct
  source 1..20: mol_type = other DNA
tatctatcacctcaagcatt

SEQ ID NO: 280286 - DNA, 20 bp, synthetic construct
  source 1..20: mol_type = other DNA
gtatctatcacctcaagcat

SEQ ID NO: 280287 - DNA, 20 bp, synthetic construct
  source 1..20: mol_type = other DNA
ggtatctatcacctcaagca

SEQ ID NO: 280288 - DNA, 20 bp, synthetic construct
  source 1..20: mol_type = other DNA
gggtatctatcacctcaagc

SEQ ID NO: 280289 - DNA, 20 bp, synthetic construct
  source 1..20: mol_type = other DNA
ggggtatctatcacctcaag

SEQ ID NO: 280290 - DNA, 20 bp, synthetic construct
  source 1..20: mol_type = other DNA
tggggtatctatcacctcaa

SEQ ID NO: 280291 - DNA, 20 bp, synthetic construct
  source 1..20: mol_type = other DNA
atggggtatctatcacctca

SEQ ID NO: 280292 - DNA, 20 bp, synthetic construct
  source 1..20: mol_type = other DNA
aatggggtatctatcacctc

SEQ ID NO: 280293 - DNA, 20 bp, synthetic construct
  source 1..20: mol_type = other DNA
gaatggggtatctatcacct

SEQ ID NO: 280294 - DNA, 20 bp, synthetic construct
  source 1..20: mol_type = other DNA
tgaatggggtatctatcacc

SEQ ID NO: 280295 - DNA, 20 bp, synthetic construct
  source 1..20: mol_type = other DNA
gtgaatggggtatctatcac

SEQ ID NO: 280296 - DNA, 20 bp, synthetic construct
  source 1..20: mol_type = other DNA
ggtgaatggggtatctatca

SEQ ID NO: 280297 - DNA, 20 bp, synthetic construct
  source 1..20: mol_type = other DNA
cggtgaatggggtatctatc

SEQ ID NO: 280298 - DNA, 20 bp, synthetic construct
  source 1..20: mol_type = other DNA
acggtgaatggggtatctat

SEQ ID NO: 280299 - DNA, 20 bp, synthetic construct
  source 1..20: mol_type = other DNA
cacggtgaatggggtatcta

SEQ ID NO: 280300 - DNA, 20 bp, synthetic construct
  source 1..20: mol_type = other DNA
tcacggtgaatggggtatct

SEQ ID NO: 280301 - DNA, 20 bp, synthetic construct
  source 1..20: mol_type = other DNA
atcacggtgaatggggtatc

SEQ ID NO: 280302 - DNA, 20 bp, synthetic construct
  source 1..20: mol_type = other DNA
catcacggtgaatggggtat

SEQ ID NO: 280303 - DNA, 20 bp, synthetic construct
  source 1..20: mol_type = other DNA
acatcacggtgaatggggta

SEQ ID NO: 280304 - DNA, 20 bp, synthetic construct
  source 1..20: mol_type = other DNA
cacatcacggtgaatggggt

SEQ ID NO: 280305 - DNA, 20 bp, synthetic construct
  source 1..20: mol_type = other DNA
tcacatcacggtgaatgggg

SEQ ID NO: 280306 - DNA, 20 bp, synthetic construct
  source 1..20: mol_type = other DNA
atcacatcacggtgaatggg

SEQ ID NO: 280307 - DNA, 20 bp, synthetic construct
  source 1..20: mol_type = other DNA
aatcacatcacggtgaatgg

SEQ ID NO: 280308 - DNA, 20 bp, synthetic construct
  source 1..20: mol_type = other DNA
taatcacatcacggtgaatg

SEQ ID NO: 280309 - DNA, 20 bp, synthetic construct
  source 1..20: mol_type = other DNA
ataatcacatcacggtgaat

SEQ ID NO: 280310 - DNA, 20 bp, synthetic construct
  source 1..20: mol_type = other DNA
aataatcacatcacggtgaa

SEQ ID NO: 280311 - DNA, 20 bp, synthetic construct
  source 1..20: mol_type = other DNA
caataatcacatcacggtga

SEQ ID NO: 280312 - DNA, 20 bp, synthetic construct
  source 1..20: mol_type = other DNA
gcaataatcacatcacggtg

SEQ ID NO: 280313 - DNA, 20 bp, synthetic construct
  source 1..20: mol_type = other DNA
tgcaataatcacatcacggt

SEQ ID NO: 280314 - DNA, 20 bp, synthetic construct
  source 1..20: mol_type = other DNA
gtgcaataatcacatcacgg

SEQ ID NO: 280315 - DNA, 20 bp, synthetic construct
  source 1..20: mol_type = other DNA
tgtgcaataatcacatcacg

SEQ ID NO: 280316 - DNA, 20 bp, synthetic construct
  source 1..20: mol_type = other DNA
ttgtgcaataatcacatcac

SEQ ID NO: 280317 - DNA, 20 bp, synthetic construct
  source 1..20: mol_type = other DNA
attgtgcaataatcacatca

SEQ ID NO: 280318 - DNA, 20 bp, synthetic construct
  source 1..20: mol_type = other DNA
cattgtgcaataatcacatc

SEQ ID NO: 280319 - DNA, 20 bp, synthetic construct
  source 1..20: mol_type = other DNA
acattgtgcaataatcacat

SEQ ID NO: 280320 - DNA, 20 bp, synthetic construct
  source 1..20: mol_type = other DNA
tacattgtgcaataatcaca

SEQ ID NO: 280321 - DNA, 20 bp, synthetic construct
  source 1..20: mol_type = other DNA
atacattgtgcaataatcac

SEQ ID NO: 280322 - DNA, 20 bp, synthetic construct
  source 1..20: mol_type = other DNA
catacattgtgcaataatca

SEQ ID NO: 280323 - DNA, 20 bp, synthetic construct
  source 1..20: mol_type = other DNA
acatacattgtgcaataatc

SEQ ID NO: 280324 - DNA, 20 bp, synthetic construct
  source 1..20: mol_type = other DNA
gacatacattgtgcaataat

SEQ ID NO: 280325 - DNA, 20 bp, synthetic construct
  source 1..20: mol_type = other DNA
agacatacattgtgcaataa

SEQ ID NO: 280326 - DNA, 20 bp, synthetic construct
  source 1..20: mol_type = other DNA
cagacatacattgtgcaata

SEQ ID NO: 280327 - DNA, 20 bp, synthetic construct
  source 1..20: mol_type = other DNA
acagacatacattgtgcaat

SEQ ID NO: 280328 - DNA, 20 bp, synthetic construct
  source 1..20: mol_type = other DNA
tacagacatacattgtgcaa

SEQ ID NO: 280329 - DNA, 20 bp, synthetic construct
  source 1..20: mol_type = other DNA
atacagacatacattgtgca

SEQ ID NO: 280330 - DNA, 20 bp, synthetic construct
  source 1..20: mol_type = other DNA
gatacagacatacattgtgc

SEQ ID NO: 280331 - DNA, 20 bp, synthetic construct
  source 1..20: mol_type = other DNA
agatacagacatacattgtg

SEQ ID NO: 280332 - DNA, 20 bp, synthetic construct
  source 1..20: mol_type = other DNA
tagatacagacatacattgt

SEQ ID NO: 280333 - DNA, 20 bp, synthetic construct
  source 1..20: mol_type = other DNA
ttagatacagacatacattg

SEQ ID NO: 280334 - DNA, 20 bp, synthetic construct
  source 1..20: mol_type = other DNA
tttagatacagacatacatt

SEQ ID NO: 280335 - DNA, 20 bp, synthetic construct
  source 1..20: mol_type = other DNA
atttagatacagacatacat

SEQ ID NO: 280336 - DNA, 20 bp, synthetic construct
  source 1..20: mol_type = other DNA
tatttagatacagacataca

SEQ ID NO: 280337 - DNA, 20 bp, synthetic construct
  source 1..20: mol_type = other DNA
atatttagatacagacatac

SEQ ID NO: 280338 - DNA, 20 bp, synthetic construct
  source 1..20: mol_type = other DNA
gatatttagatacagacata

SEQ ID NO: 280339 - DNA, 20 bp, synthetic construct
  source 1..20: mol_type = other DNA
agatatttagatacagacat

SEQ ID NO: 280340 - DNA, 20 bp, synthetic construct
  source 1..20: mol_type = other DNA
gagatatttagatacagaca

SEQ ID NO: 280341 - DNA, 20 bp, synthetic construct
  source 1..20: mol_type = other DNA
tgagatatttagatacagac

SEQ ID NO: 280342 - DNA, 20 bp, synthetic construct
  source 1..20: mol_type = other DNA
atgagatatttagatacaga

SEQ ID NO: 280343 - DNA, 20 bp, synthetic construct
  source 1..20: mol_type = other DNA
catgagatatttagatacag

SEQ ID NO: 280344 - DNA, 20 bp, synthetic construct
  source 1..20: mol_type = other DNA
acatgagatatttagataca

SEQ ID NO: 280345 - DNA, 20 bp, synthetic construct
  source 1..20: mol_type = other DNA
tacatgagatatttagatac

SEQ ID NO: 280346 - DNA, 20 bp, synthetic construct
  source 1..20: mol_type = other DNA
gtacatgagatatttagata

SEQ ID NO: 280347 - DNA, 20 bp, synthetic construct
  source 1..20: mol_type = other DNA
ggtacatgagatatttagat

SEQ ID NO: 280348 - DNA, 20 bp, synthetic construct
  source 1..20: mol_type = other DNA
gggtacatgagatatttaga

SEQ ID NO: 280349 - DNA, 20 bp, synthetic construct
  source 1..20: mol_type = other DNA
ggggtacatgagatatttag

SEQ ID NO: 280350 - DNA, 20 bp, synthetic construct
  source 1..20: mol_type = other DNA
tggggtacatgagatattta

SEQ ID NO: 280351 - DNA, 20 bp, synthetic construct
  source 1..20: mol_type = other DNA
gtggggtacatgagatattt

SEQ ID NO: 280352 - DNA, 20 bp, synthetic construct
  source 1..20: mol_type = other DNA
tgtggggtacatgagatatt

SEQ ID NO: 280353 - DNA, 20 bp, synthetic construct
  source 1..20: mol_type = other DNA
ttgtggggtacatgagatat

SEQ ID NO: 280354 - DNA, 20 bp, synthetic construct
  source 1..20: mol_type = other DNA
cttgtggggtacatgagata

SEQ ID NO: 280355 - DNA, 20 bp, synthetic construct
  source 1..20: mol_type = other DNA
acttgtggggtacatgagat

SEQ ID NO: 280356 - DNA, 20 bp, synthetic construct
  source 1..20: mol_type = other DNA
tacttgtggggtacatgaga

SEQ ID NO: 280357 - DNA, 20 bp, synthetic construct
  source 1..20: mol_type = other DNA
atacttgtggggtacatgag

SEQ ID NO: 280358 - DNA, 20 bp, synthetic construct
  source 1..20: mol_type = other DNA
tatacttgtggggtacatga

SEQ ID NO: 280359 - DNA, 20 bp, synthetic construct
  source 1..20: mol_type = other DNA
atatacttgtggggtacatg

SEQ ID NO: 280360 - DNA, 20 bp, synthetic construct
  source 1..20: mol_type = other DNA
tatatacttgtggggtacat

SEQ ID NO: 280361 - DNA, 20 bp, synthetic construct
  source 1..20: mol_type = other DNA
gtatatacttgtggggtaca

SEQ ID NO: 280362 - DNA, 20 bp, synthetic construct
  source 1..20: mol_type = other DNA
tgtatatacttgtggggtac

SEQ ID NO: 280363 - DNA, 20 bp, synthetic construct
  source 1..20: mol_type = other DNA
gtgtatatacttgtggggta

SEQ ID NO: 280364 - DNA, 20 bp, synthetic construct
  source 1..20: mol_type = other DNA
ggtgtatatacttgtggggt

SEQ ID NO: 280365 - DNA, 20 bp, synthetic construct
  source 1..20: mol_type = other DNA
aggtgtatatacttgtgggg

SEQ ID NO: 280366 - DNA, 20 bp, synthetic construct
  source 1..20: mol_type = other DNA
taggtgtatatacttgtggg

SEQ ID NO: 280367 - DNA, 20 bp, synthetic construct
  source 1..20: mol_type = other DNA
gtaggtgtatatacttgtgg

SEQ ID NO: 280368 - DNA, 20 bp, synthetic construct
  source 1..20: mol_type = other DNA
agtaggtgtatatacttgtg

SEQ ID NO: 280369 - DNA, 20 bp, synthetic construct
  source 1..20: mol_type = other DNA
tagtaggtgtatatacttgt

SEQ ID NO: 280370 - DNA, 20 bp, synthetic construct
  source 1..20: mol_type = other DNA
atagtaggtgtatatacttg

SEQ ID NO: 280371 - DNA, 20 bp, synthetic construct
  source 1..20: mol_type = other DNA
catagtaggtgtatatactt

SEQ ID NO: 280372 - DNA, 20 bp, synthetic construct
  source 1..20: mol_type = other DNA
acatagtaggtgtatatact

SEQ ID NO: 280373 - DNA, 20 bp, synthetic construct
  source 1..20: mol_type = other DNA
tacatagtaggtgtatatac

SEQ ID NO: 280374 - DNA, 20 bp, synthetic construct
  source 1..20: mol_type = other DNA
gtacatagtaggtgtatata

SEQ ID NO: 280375 - DNA, 20 bp, synthetic construct
  source 1..20: mol_type = other DNA
ggtacatagtaggtgtatat

SEQ ID NO: 280376 - DNA, 20 bp, synthetic construct
  source 1..20: mol_type = other DNA
gggtacatagtaggtgtata

SEQ ID NO: 280377 - DNA, 20 bp, synthetic construct
  source 1..20: mol_type = other DNA
tgggtacatagtaggtgtat

SEQ ID NO: 280378 - DNA, 20 bp, synthetic construct
  source 1..20: mol_type = other DNA
atgggtacatagtaggtgta

SEQ ID NO: 280379 - DNA, 20 bp, synthetic construct
  source 1..20: mol_type = other DNA
tatgggtacatagtaggtgt

SEQ ID NO: 280380 - DNA, 20 bp, synthetic construct
  source 1..20: mol_type = other DNA
atatgggtacatagtaggtg

SEQ ID NO: 280381 - DNA, 20 bp, synthetic construct
  source 1..20: mol_type = other DNA
tatatgggtacatagtaggt

SEQ ID NO: 280382 - DNA, 20 bp, synthetic construct
  source 1..20: mol_type = other DNA
ttatatgggtacatagtagg

SEQ ID NO: 280383 - DNA, 20 bp, synthetic construct
  source 1..20: mol_type = other DNA
tttatatgggtacatagtag

SEQ ID NO: 280384 - DNA, 20 bp, synthetic construct
  source 1..20: mol_type = other DNA
atttatatgggtacatagta

SEQ ID NO: 280385 - DNA, 20 bp, synthetic construct
  source 1..20: mol_type = other DNA
aatttatatgggtacatagt

SEQ ID NO: 280386 - DNA, 20 bp, synthetic construct
  source 1..20: mol_type = other DNA
aaatttatatgggtacatag

SEQ ID NO: 280387 - DNA, 20 bp, synthetic construct
  source 1..20: mol_type = other DNA
taaatttatatgggtacata

SEQ ID NO: 280388 - DNA, 20 bp, synthetic construct
  source 1..20: mol_type = other DNA
ttaaatttatatgggtacat

SEQ ID NO: 280389 - DNA, 20 bp, synthetic construct
  source 1..20: mol_type = other DNA
tttaaatttatatgggtaca

SEQ ID NO: 280390 - DNA, 20 bp, synthetic construct
  source 1..20: mol_type = other DNA
ttttaaatttatatgggtac

SEQ ID NO: 280391 - DNA, 20 bp, synthetic construct
  source 1..20: mol_type = other DNA
attttaaatttatatgggta

SEQ ID NO: 280392 - DNA, 20 bp, synthetic construct
  source 1..20: mol_type = other DNA
aattttaaatttatatgggt

SEQ ID NO: 280393 - DNA, 20 bp, synthetic construct
  source 1..20: mol_type = other DNA
taattttaaatttatatggg

SEQ ID NO: 280394 - DNA, 20 bp, synthetic construct
  source 1..20: mol_type = other DNA
ttaattttaaatttatatgg

SEQ ID NO: 280395 - DNA, 20 bp, synthetic construct
  source 1..20: mol_type = other DNA
tttaattttaaatttatatg

SEQ ID NO: 280396 - DNA, 20 bp, synthetic construct
  source 1..20: mol_type = other DNA
ttttaattttaaatttatat

SEQ ID NO: 280397 - DNA, 20 bp, synthetic construct
  source 1..20: mol_type = other DNA
tttttaattttaaatttata

SEQ ID NO: 280398 - DNA, 20 bp, synthetic construct
  source 1..20: mol_type = other DNA
ttttttaattttaaatttat

SEQ ID NO: 280399 - DNA, 20 bp, synthetic construct
  source 1..20: mol_type = other DNA
attttttaattttaaattta

SEQ ID NO: 280400 - DNA, 20 bp, synthetic construct
  source 1..20: mol_type = other DNA
aattttttaattttaaattt

SEQ ID NO: 280401 - DNA, 20 bp, synthetic construct
  source 1..20: mol_type = other DNA
taattttttaattttaaatt

SEQ ID NO: 280402 - DNA, 20 bp, synthetic construct
  source 1..20: mol_type = other DNA
ataattttttaattttaaat

SEQ ID NO: 280403 - DNA, 20 bp, synthetic construct
  source 1..20: mol_type = other DNA
tataattttttaattttaaa

SEQ ID NO: 280404 - DNA, 20 bp, synthetic construct
  source 1..20: mol_type = other DNA
ttataattttttaattttaa

SEQ ID NO: 280405 - DNA, 20 bp, synthetic construct
  source 1..20: mol_type = other DNA
tttataattttttaatttta

SEQ ID NO: 280406 - DNA, 20 bp, synthetic construct
  source 1..20: mol_type = other DNA
ttttataattttttaatttt

SEQ ID NO: 280407 - DNA, 20 bp, synthetic construct
  source 1..20: mol_type = other DNA
gttttataattttttaattt

SEQ ID NO: 280408 - DNA, 20 bp, synthetic construct
  source 1..20: mol_type = other DNA
tgttttataattttttaatt

SEQ ID NO: 280409 - DNA, 20 bp, synthetic construct
  source 1..20: mol_type = other DNA
ttgttttataattttttaat

SEQ ID NO: 280410 - DNA, 20 bp, synthetic construct
  source 1..20: mol_type = other DNA
tttgttttataattttttaa

SEQ ID NO: 280411 - DNA, 20 bp, synthetic construct
  source 1..20: mol_type = other DNA
ttttgttttataatttttta

SEQ ID NO: 280412 - DNA, 20 bp, synthetic construct
  source 1..20: mol_type = other DNA
tttttgttttataatttttt

SEQ ID NO: 280413 - DNA, 20 bp, synthetic construct
  source 1..20: mol_type = other DNA
atttttgttttataattttt

SEQ ID NO: 280414 - DNA, 20 bp, synthetic construct
  source 1..20: mol_type = other DNA
tatttttgttttataatttt

SEQ ID NO: 280415 - DNA, 20 bp, synthetic construct
  source 1..20: mol_type = other DNA
ttatttttgttttataattt

SEQ ID NO: 280416 - DNA, 20 bp, synthetic construct
  source 1..20: mol_type = other DNA
tttatttttgttttataatt

SEQ ID NO: 280417 - DNA, 20 bp, synthetic construct
  source 1..20: mol_type = other DNA
atttatttttgttttataat

SEQ ID NO: 280418 - DNA, 20 bp, synthetic construct
  source 1..20: mol_type = other DNA
tatttatttttgttttataa

SEQ ID NO: 280419 - DNA, 20 bp, synthetic construct
  source 1..20: mol_type = other DNA
ttatttatttttgttttata

SEQ ID NO: 280420 - DNA, 20 bp, synthetic construct
  source 1..20: mol_type = other DNA
cttatttatttttgttttat

SEQ ID NO: 280421 - DNA, 20 bp, synthetic construct
  source 1..20: mol_type = other DNA
acttatttatttttgtttta

SEQ ID NO: 280422 - DNA, 20 bp, synthetic construct
  source 1..20: mol_type = other DNA
tacttatttatttttgtttt

SEQ ID NO: 280423 - DNA, 20 bp, synthetic construct
  source 1..20: mol_type = other DNA
ttacttatttatttttgttt

SEQ ID NO: 280424 - DNA, 20 bp, synthetic construct
  source 1..20: mol_type = other DNA
tttacttatttatttttgtt

SEQ ID NO: 280425 - DNA, 20 bp, synthetic construct
  source 1..20: mol_type = other DNA
atttacttatttatttttgt

SEQ ID NO: 280426 - DNA, 20 bp, synthetic construct
  source 1..20: mol_type = other DNA
aatttacttatttatttttg

SEQ ID NO: 280427 - DNA, 20 bp, synthetic construct
  source 1..20: mol_type = other DNA
taatttacttatttattttt

SEQ ID NO: 280428 - DNA, 20 bp, synthetic construct
  source 1..20: mol_type = other DNA
ttaatttacttatttatttt

SEQ ID NO: 280429 - DNA, 20 bp, synthetic construct
  source 1..20: mol_type = other DNA
tttaatttacttatttattt

SEQ ID NO: 280430 - DNA, 20 bp, synthetic construct
  source 1..20: mol_type = other DNA
ttttaatttacttatttatt

SEQ ID NO: 280431 - DNA, 20 bp, synthetic construct
  source 1..20: mol_type = other DNA
attttaatttacttatttat

SEQ ID NO: 280432 - DNA, 20 bp, synthetic construct
  source 1..20: mol_type = other DNA
cattttaatttacttattta

SEQ ID NO: 280433 - DNA, 20 bp, synthetic construct
  source 1..20: mol_type = other DNA
acattttaatttacttattt

SEQ ID NO: 280434 - DNA, 20 bp, synthetic construct
  source 1..20: mol_type = other DNA
tacattttaatttacttatt

SEQ ID NO: 280435 - DNA, 20 bp, synthetic construct
  source 1..20: mol_type = other DNA
ctacattttaatttacttat

SEQ ID NO: 280436 - DNA, 20 bp, synthetic construct
  source 1..20: mol_type = other DNA
cctacattttaatttactta

SEQ ID NO: 280437 - DNA, 20 bp, synthetic construct
  source 1..20: mol_type = other DNA
gcctacattttaatttactt

SEQ ID NO: 280438 - DNA, 20 bp, synthetic construct
  source 1..20: mol_type = other DNA
agcctacattttaatttact

SEQ ID NO: 280439 - DNA, 20 bp, synthetic construct
  source 1..20: mol_type = other DNA
cagcctacattttaatttac

SEQ ID NO: 280440 - DNA, 20 bp, synthetic construct
  source 1..20: mol_type = other DNA
ccagcctacattttaattta

SEQ ID NO: 280441 - DNA, 20 bp, synthetic construct
  source 1..20: mol_type = other DNA
tccagcctacattttaattt

SEQ ID NO: 280442 - DNA, 20 bp, synthetic construct
  source 1..20: mol_type = other DNA
gtccagcctacattttaatt

SEQ ID NO: 280443 - DNA, 20 bp, synthetic construct
  source 1..20: mol_type = other DNA
tgtccagcctacattttaat

SEQ ID NO: 280444 - DNA, 20 bp, synthetic construct
  source 1..20: mol_type = other DNA
gtgtccagcctacattttaa

SEQ ID NO: 280445 - DNA, 20 bp, synthetic construct
  source 1..20: mol_type = other DNA
ggtgtccagcctacatttta

SEQ ID NO: 280446 - DNA, 20 bp, synthetic construct
  source 1..20: mol_type = other DNA
cggtgtccagcctacatttt

SEQ ID NO: 280447 - DNA, 20 bp, synthetic construct
  source 1..20: mol_type = other DNA
acggtgtccagcctacattt

SEQ ID NO: 280448 - DNA, 20 bp, synthetic construct
  source 1..20: mol_type = other DNA
cacggtgtccagcctacatt

SEQ ID NO: 280449 - DNA, 20 bp, synthetic construct
  source 1..20: mol_type = other DNA
ccacggtgtccagcctacat

SEQ ID NO: 280450 - DNA, 20 bp, synthetic construct
  source 1..20: mol_type = other DNA
accacggtgtccagcctaca

SEQ ID NO: 280451 - DNA, 20 bp, synthetic construct
  source 1..20: mol_type = other DNA
aaccacggtgtccagcctac

SEQ ID NO: 280452 - DNA, 20 bp, synthetic construct
  source 1..20: mol_type = other DNA
gaaccacggtgtccagccta

SEQ ID NO: 280453 - DNA, 20 bp, synthetic construct
  source 1..20: mol_type = other DNA
tgaaccacggtgtccagcct

SEQ ID NO: 280454 - DNA, 20 bp, synthetic construct
  source 1..20: mol_type = other DNA
gtgaaccacggtgtccagcc

SEQ ID NO: 280455 - DNA, 20 bp, synthetic construct
  source 1..20: mol_type = other DNA
cgtgaaccacggtgtccagc

SEQ ID NO: 280456 - DNA, 20 bp, synthetic construct
  source 1..20: mol_type = other DNA
gcgtgaaccacggtgtccag

SEQ ID NO: 280457 - DNA, 20 bp, synthetic construct
  source 1..20: mol_type = other DNA
ggcgtgaaccacggtgtcca

SEQ ID NO: 280458 - DNA, 20 bp, synthetic construct
  source 1..20: mol_type = other DNA
aggcgtgaaccacggtgtcc

SEQ ID NO: 280459 - DNA, 20 bp, synthetic construct
  source 1..20: mol_type = other DNA
caggcgtgaaccacggtgtc

SEQ ID NO: 280460 - DNA, 20 bp, synthetic construct
  source 1..20: mol_type = other DNA
acaggcgtgaaccacggtgt

SEQ ID NO: 280461 - DNA, 20 bp, synthetic construct
  source 1..20: mol_type = other DNA
tacaggcgtgaaccacggtg

SEQ ID NO: 280462 - DNA, 20 bp, synthetic construct
  source 1..20: mol_type = other DNA
ttacaggcgtgaaccacggt

SEQ ID NO: 280463 - DNA, 20 bp, synthetic construct
  source 1..20: mol_type = other DNA
attacaggcgtgaaccacgg

SEQ ID NO: 280464 - DNA, 20 bp, synthetic construct
  source 1..20: mol_type = other DNA
gattacaggcgtgaaccacg

SEQ ID NO: 280465 - DNA, 20 bp, synthetic construct
  source 1..20: mol_type = other DNA
ggattacaggcgtgaaccac

SEQ ID NO: 280466 - DNA, 20 bp, synthetic construct
  source 1..20: mol_type = other DNA
gggattacaggcgtgaacca

SEQ ID NO: 280467 - DNA, 20 bp, synthetic construct
  source 1..20: mol_type = other DNA
tgggattacaggcgtgaacc

SEQ ID NO: 280468 - DNA, 20 bp, synthetic construct
  source 1..20: mol_type = other DNA
ctgggattacaggcgtgaac

SEQ ID NO: 280469 - DNA, 20 bp, synthetic construct
  source 1..20: mol_type = other DNA
actgggattacaggcgtgaa

SEQ ID NO: 280470 - DNA, 20 bp, synthetic construct
  source 1..20: mol_type = other DNA
cactgggattacaggcgtga

SEQ ID NO: 280471 - DNA, 20 bp, synthetic construct
  source 1..20: mol_type = other DNA
gcactgggattacaggcgtg

SEQ ID NO: 280472 - DNA, 20 bp, synthetic construct
  source 1..20: mol_type = other DNA
agcactgggattacaggcgt

SEQ ID NO: 280473 - DNA, 20 bp, synthetic construct
  source 1..20: mol_type = other DNA
aagcactgggattacaggcg

SEQ ID NO: 280474 - DNA, 20 bp, synthetic construct
  source 1..20: mol_type = other DNA
aaagcactgggattacaggc

SEQ ID NO: 280475 - DNA, 20 bp, synthetic construct
  source 1..20: mol_type = other DNA
caaagcactgggattacagg

SEQ ID NO: 280476 - DNA, 20 bp, synthetic construct
  source 1..20: mol_type = other DNA
acaaagcactgggattacag

SEQ ID NO: 280477 - DNA, 20 bp, synthetic construct
  source 1..20: mol_type = other DNA
cacaaagcactgggattaca

SEQ ID NO: 280478 - DNA, 20 bp, synthetic construct
  source 1..20: mol_type = other DNA
tcacaaagcactgggattac

SEQ ID NO: 280479 - DNA, 20 bp, synthetic construct
  source 1..20: mol_type = other DNA
ctcacaaagcactgggatta

SEQ ID NO: 280480 - DNA, 20 bp, synthetic construct
  source 1..20: mol_type = other DNA
cctcacaaagcactgggatt

SEQ ID NO: 280481 - DNA, 20 bp, synthetic construct
  source 1..20: mol_type = other DNA
gcctcacaaagcactgggat

SEQ ID NO: 280482 - DNA, 20 bp, synthetic construct
  source 1..20: mol_type = other DNA
agcctcacaaagcactggga

SEQ ID NO: 280483 - DNA, 20 bp, synthetic construct
  source 1..20: mol_type = other DNA
cagcctcacaaagcactggg

SEQ ID NO: 280484 - DNA, 20 bp, synthetic construct
  source 1..20: mol_type = other DNA
tcagcctcacaaagcactgg

SEQ ID NO: 280485 - DNA, 20 bp, synthetic construct
  source 1..20: mol_type = other DNA
ctcagcctcacaaagcactg

SEQ ID NO: 280486 - DNA, 20 bp, synthetic construct
  source 1..20: mol_type = other DNA
cctcagcctcacaaagcact

SEQ ID NO: 280487 - DNA, 20 bp, synthetic construct
  source 1..20: mol_type = other DNA
acctcagcctcacaaagcac

SEQ ID NO: 280488 - DNA, 20 bp, synthetic construct
  source 1..20: mol_type = other DNA
cacctcagcctcacaaagca

SEQ ID NO: 280489 - DNA, 20 bp, synthetic construct
  source 1..20: mol_type = other DNA
tcacctcagcctcacaaagc

SEQ ID NO: 280490 - DNA, 20 bp, synthetic construct
  source 1..20: mol_type = other DNA
ctcacctcagcctcacaaag

SEQ ID NO: 280491 - DNA, 20 bp, synthetic construct
  source 1..20: mol_type = other DNA
tctcacctcagcctcacaaa

SEQ ID NO: 280492 - DNA, 20 bp, synthetic construct
  source 1..20: mol_type = other DNA
ctctcacctcagcctcacaa

SEQ ID NO: 280493 - DNA, 20 bp, synthetic construct
  source 1..20: mol_type = other DNA
tctctcacctcagcctcaca

SEQ ID NO: 280494 - DNA, 20 bp, synthetic construct
  source 1..20: mol_type = other DNA
ttctctcacctcagcctcac

SEQ ID NO: 280495 - DNA, 20 bp, synthetic construct
  source 1..20: mol_type = other DNA
attctctcacctcagcctca

SEQ ID NO: 280496 - DNA, 20 bp, synthetic construct
  source 1..20: mol_type = other DNA
gattctctcacctcagcctc

SEQ ID NO: 280497 - DNA, 20 bp, synthetic construct
  source 1..20: mol_type = other DNA
tgattctctcacctcagcct

SEQ ID NO: 280498 - DNA, 20 bp, synthetic construct
  source 1..20: mol_type = other DNA
gtgattctctcacctcagcc

SEQ ID NO: 280499 - DNA, 20 bp, synthetic construct
  source 1..20: mol_type = other DNA
agtgattctctcacctcagc

SEQ ID NO: 280500 - DNA, 20 bp, synthetic construct
  source 1..20: mol_type = other DNA
aagtgattctctcacctcag

SEQ ID NO: 280501 - DNA, 20 bp, synthetic construct
  source 1..20: mol_type = other DNA
caagtgattctctcacctca

SEQ ID NO: 280502 - DNA, 20 bp, synthetic construct
  source 1..20: mol_type = other DNA
tcaagtgattctctcacctc

SEQ ID NO: 280503 - DNA, 20 bp, synthetic construct
  source 1..20: mol_type = other DNA
ctcaagtgattctctcacct

SEQ ID NO: 280504 - DNA, 20 bp, synthetic construct
  source 1..20: mol_type = other DNA
gctcaagtgattctctcacc

SEQ ID NO: 280505 - DNA, 20 bp, synthetic construct
  source 1..20: mol_type = other DNA
ggctcaagtgattctctcac

SEQ ID NO: 280506 - DNA, 20 bp, synthetic construct
  source 1..20: mol_type = other DNA
gggctcaagtgattctctca

SEQ ID NO: 280507 - DNA, 20 bp, synthetic construct
  source 1..20: mol_type = other DNA
tgggctcaagtgattctctc

SEQ ID NO: 280508 - DNA, 20 bp, synthetic construct
  source 1..20: mol_type = other DNA
ctgggctcaagtgattctct

SEQ ID NO: 280509 - DNA, 20 bp, synthetic construct
  source 1..20: mol_type = other DNA
cctgggctcaagtgattctc

SEQ ID NO: 280510 - DNA, 20 bp, synthetic construct
  source 1..20: mol_type = other DNA
tcctgggctcaagtgattct

SEQ ID NO: 280511 - DNA, 20 bp, synthetic construct
  source 1..20: mol_type = other DNA
ctcctgggctcaagtgattc

SEQ ID NO: 280512 - DNA, 20 bp, synthetic construct
  source 1..20: mol_type = other DNA
actcctgggctcaagtgatt

SEQ ID NO: 280513 - DNA, 20 bp, synthetic construct
  source 1..20: mol_type = other DNA
aactcctgggctcaagtgat

SEQ ID NO: 280514 - DNA, 20 bp, synthetic construct
  source 1..20: mol_type = other DNA
aaactcctgggctcaagtga

SEQ ID NO: 280515 - DNA, 20 bp, synthetic construct
  source 1..20: mol_type = other DNA
caaactcctgggctcaagtg

SEQ ID NO: 280516 - DNA, 20 bp, synthetic construct
  source 1..20: mol_type = other DNA
tcaaactcctgggctcaagt

SEQ ID NO: 280517 - DNA, 20 bp, synthetic construct
  source 1..20: mol_type = other DNA
ctcaaactcctgggctcaag

SEQ ID NO: 280518 - DNA, 20 bp, synthetic construct
  source 1..20: mol_type = other DNA
tctcaaactcctgggctcaa

SEQ ID NO: 280519 - DNA, 20 bp, synthetic construct
  source 1..20: mol_type = other DNA
gtctcaaactcctgggctca

SEQ ID NO: 280520 - DNA, 20 bp, synthetic construct
  source 1..20: mol_type = other DNA
ggtctcaaactcctgggctc

SEQ ID NO: 280521 - DNA, 20 bp, synthetic construct
  source 1..20: mol_type = other DNA
cggtctcaaactcctgggct

SEQ ID NO: 280522 - DNA, 20 bp, synthetic construct
  source 1..20: mol_type = other DNA
ccggtctcaaactcctgggc

SEQ ID NO: 280523 - DNA, 20 bp, synthetic construct
  source 1..20: mol_type = other DNA
gccggtctcaaactcctggg

SEQ ID NO: 280524 - DNA, 20 bp, synthetic construct
  source 1..20: mol_type = other DNA
ggccggtctcaaactcctgg

SEQ ID NO: 280525 - DNA, 20 bp, synthetic construct
  source 1..20: mol_type = other DNA
aggccggtctcaaactcctg

SEQ ID NO: 280526 - DNA, 20 bp, synthetic construct
  source 1..20: mol_type = other DNA
caggccggtctcaaactcct

SEQ ID NO: 280527 - DNA, 20 bp, synthetic construct
  source 1..20: mol_type = other DNA
ccaggccggtctcaaactcc

SEQ ID NO: 280528 - DNA, 20 bp, synthetic construct
  source 1..20: mol_type = other DNA
cccaggccggtctcaaactc

SEQ ID NO: 280529 - DNA, 20 bp, synthetic construct
  source 1..20: mol_type = other DNA
acccaggccggtctcaaact

SEQ ID NO: 280530 - DNA, 20 bp, synthetic construct
  source 1..20: mol_type = other DNA
cacccaggccggtctcaaac

SEQ ID NO: 280531 - DNA, 20 bp, synthetic construct
  source 1..20: mol_type = other DNA
tcacccaggccggtctcaaa

SEQ ID NO: 280532 - DNA, 20 bp, synthetic construct
  source 1..20: mol_type = other DNA
gtcacccaggccggtctcaa

SEQ ID NO: 280533 - DNA, 20 bp, synthetic construct
  source 1..20: mol_type = other DNA
tgtcacccaggccggtctca

SEQ ID NO: 280534 - DNA, 20 bp, synthetic construct
  source 1..20: mol_type = other DNA
atgtcacccaggccggtctc

SEQ ID NO: 280535 - DNA, 20 bp, synthetic construct
  source 1..20: mol_type = other DNA
tatgtcacccaggccggtct

SEQ ID NO: 280536 - DNA, 20 bp, synthetic construct
  source 1..20: mol_type = other DNA
ctatgtcacccaggccggtc

SEQ ID NO: 280537 - DNA, 20 bp, synthetic construct
  source 1..20: mol_type = other DNA
gctatgtcacccaggccggt

SEQ ID NO: 280538 - DNA, 20 bp, synthetic construct
  source 1..20: mol_type = other DNA
cgctatgtcacccaggccgg

SEQ ID NO: 280539 - DNA, 20 bp, synthetic construct
  source 1..20: mol_type = other DNA
tcgctatgtcacccaggccg

SEQ ID NO: 280540 - DNA, 20 bp, synthetic construct
  source 1..20: mol_type = other DNA
ctcgctatgtcacccaggcc

SEQ ID NO: 280541 - DNA, 20 bp, synthetic construct
  source 1..20: mol_type = other DNA
tctcgctatgtcacccaggc

SEQ ID NO: 280542 - DNA, 20 bp, synthetic construct
  source 1..20: mol_type = other DNA
gtctcgctatgtcacccagg

SEQ ID NO: 280543 - DNA, 20 bp, synthetic construct
  source 1..20: mol_type = other DNA
ggtctcgctatgtcacccag

SEQ ID NO: 280544 - DNA, 20 bp, synthetic construct
  source 1..20: mol_type = other DNA
gggtctcgctatgtcaccca

SEQ ID NO: 280545 - DNA, 20 bp, synthetic construct
  source 1..20: mol_type = other DNA
ggggtctcgctatgtcaccc

SEQ ID NO: 280546 - DNA, 20 bp, synthetic construct
  source 1..20: mol_type = other DNA
tggggtctcgctatgtcacc

SEQ ID NO: 280547 - DNA, 20 bp, synthetic construct
  source 1..20: mol_type = other DNA
atggggtctcgctatgtcac

SEQ ID NO: 280548 - DNA, 20 bp, synthetic construct
  source 1..20: mol_type = other DNA
gatggggtctcgctatgtca

SEQ ID NO: 280549 - DNA, 20 bp, synthetic construct
  source 1..20: mol_type = other DNA
tgatggggtctcgctatgtc

SEQ ID NO: 280550 - DNA, 20 bp, synthetic construct
  source 1..20: mol_type = other DNA
atgatggggtctcgctatgt

SEQ ID NO: 280551 - DNA, 20 bp, synthetic construct
  source 1..20: mol_type = other DNA
gatgatggggtctcgctatg

SEQ ID NO: 280552 - DNA, 20 bp, synthetic construct
  source 1..20: mol_type = other DNA
tgatgatggggtctcgctat

SEQ ID NO: 280553 - DNA, 20 bp, synthetic construct
  source 1..20: mol_type = other DNA
gtgatgatggggtctcgcta

SEQ ID NO: 280554 - DNA, 20 bp, synthetic construct
  source 1..20: mol_type = other DNA
tgtgatgatggggtctcgct

SEQ ID NO: 280555 - DNA, 20 bp, synthetic construct
  source 1..20: mol_type = other DNA
ttgtgatgatggggtctcgc

SEQ ID NO: 280556 - DNA, 20 bp, synthetic construct
  source 1..20: mol_type = other DNA
tttgtgatgatggggtctcg

SEQ ID NO: 280557 - DNA, 20 bp, synthetic construct
  source 1..20: mol_type = other DNA
ctttgtgatgatggggtctc

SEQ ID NO: 280558 - DNA, 20 bp, synthetic construct
  source 1..20: mol_type = other DNA
tctttgtgatgatggggtct

SEQ ID NO: 280559 - DNA, 20 bp, synthetic construct
  source 1..20: mol_type = other DNA
ttctttgtgatgatggggtc

SEQ ID NO: 280560 - DNA, 20 bp, synthetic construct
  source 1..20: mol_type = other DNA
attctttgtgatgatggggt

SEQ ID NO: 280561 - DNA, 20 bp, synthetic construct
  source 1..20: mol_type = other DNA
aattctttgtgatgatgggg

SEQ ID NO: 280562 - DNA, 20 bp, synthetic construct
  source 1..20: mol_type = other DNA
aaattctttgtgatgatggg

SEQ ID NO: 280563 - DNA, 20 bp, synthetic construct
  source 1..20: mol_type = other DNA
aaaattctttgtgatgatgg

SEQ ID NO: 280564 - DNA, 20 bp, synthetic construct
  source 1..20: mol_type = other DNA
aaaaattctttgtgatgatg

SEQ ID NO: 280565 - DNA, 20 bp, synthetic construct
  source 1..20: mol_type = other DNA
taaaaattctttgtgatgat

SEQ ID NO: 280566 - DNA, 20 bp, synthetic construct
  source 1..20: mol_type = other DNA
ttaaaaattctttgtgatga

SEQ ID NO: 280567 - DNA, 20 bp, synthetic construct
  source 1..20: mol_type = other DNA
tttaaaaattctttgtgatg

SEQ ID NO: 280568 - DNA, 20 bp, synthetic construct
  source 1..20: mol_type = other DNA
ttttaaaaattctttgtgat

SEQ ID NO: 280569 - DNA, 20 bp, synthetic construct
  source 1..20: mol_type = other DNA
tttttaaaaattctttgtga

SEQ ID NO: 280570 - DNA, 20 bp, synthetic construct
  source 1..20: mol_type = other DNA
atttttaaaaattctttgtg

SEQ ID NO: 280571 - DNA, 20 bp, synthetic construct
  source 1..20: mol_type = other DNA
aatttttaaaaattctttgt

SEQ ID NO: 280572 - DNA, 20 bp, synthetic construct
  source 1..20: mol_type = other DNA
taatttttaaaaattctttg

SEQ ID NO: 280573 - DNA, 20 bp, synthetic construct
  source 1..20: mol_type = other DNA
ctaatttttaaaaattcttt

SEQ ID NO: 280574 - DNA, 20 bp, synthetic construct
  source 1..20: mol_type = other DNA
gctaatttttaaaaattctt

SEQ ID NO: 280575 - DNA, 20 bp, synthetic construct
  source 1..20: mol_type = other DNA
agctaatttttaaaaattct

SEQ ID NO: 280576 - DNA, 20 bp, synthetic construct
  source 1..20: mol_type = other DNA
cagctaatttttaaaaattc

SEQ ID NO: 280577 - DNA, 20 bp, synthetic construct
  source 1..20: mol_type = other DNA
ccagctaatttttaaaaatt

SEQ ID NO: 280578 - DNA, 20 bp, synthetic construct
  source 1..20: mol_type = other DNA
cccagctaatttttaaaaat

SEQ ID NO: 280579 - DNA, 20 bp, synthetic construct
  source 1..20: mol_type = other DNA
gcccagctaatttttaaaaa

SEQ ID NO: 280580 - DNA, 20 bp, synthetic construct
  source 1..20: mol_type = other DNA
cgcccagctaatttttaaaa

SEQ ID NO: 280581 - DNA, 20 bp, synthetic construct
  source 1..20: mol_type = other DNA
acgcccagctaatttttaaa

SEQ ID NO: 280582 - DNA, 20 bp, synthetic construct
  source 1..20: mol_type = other DNA
cacgcccagctaatttttaa

SEQ ID NO: 280583 - DNA, 20 bp, synthetic construct
  source 1..20: mol_type = other DNA
ccacgcccagctaattttta

SEQ ID NO: 280584 - DNA, 20 bp, synthetic construct
  source 1..20: mol_type = other DNA
accacgcccagctaattttt

SEQ ID NO: 280585 - DNA, 20 bp, synthetic construct
  source 1..20: mol_type = other DNA
taccacgcccagctaatttt

SEQ ID NO: 280586 - DNA, 20 bp, synthetic construct
  source 1..20: mol_type = other DNA
ctaccacgcccagctaattt

SEQ ID NO: 280587 - DNA, 20 bp, synthetic construct
  source 1..20: mol_type = other DNA
gctaccacgcccagctaatt

SEQ ID NO: 280588 - DNA, 20 bp, synthetic construct
  source 1..20: mol_type = other DNA
tgctaccacgcccagctaat

SEQ ID NO: 280589 - DNA, 20 bp, synthetic construct
  source 1..20: mol_type = other DNA
gtgctaccacgcccagctaa

SEQ ID NO: 280590 - DNA, 20 bp, synthetic construct
  source 1..20: mol_type = other DNA
tgtgctaccacgcccagcta

SEQ ID NO: 280591 - DNA, 20 bp, synthetic construct
  source 1..20: mol_type = other DNA
atgtgctaccacgcccagct

SEQ ID NO: 280592 - DNA, 20 bp, synthetic construct
  source 1..20: mol_type = other DNA
tatgtgctaccacgcccagc

SEQ ID NO: 280593 - DNA, 20 bp, synthetic construct
  source 1..20: mol_type = other DNA
gtatgtgctaccacgcccag

SEQ ID NO: 280594 - DNA, 20 bp, synthetic construct
  source 1..20: mol_type = other DNA
ggtatgtgctaccacgccca

SEQ ID NO: 280595 - DNA, 20 bp, synthetic construct
  source 1..20: mol_type = other DNA
cggtatgtgctaccacgccc

SEQ ID NO: 280596 - DNA, 20 bp, synthetic construct
  source 1..20: mol_type = other DNA
ccggtatgtgctaccacgcc

SEQ ID NO: 280597 - DNA, 20 bp, synthetic construct
  source 1..20: mol_type = other DNA
accggtatgtgctaccacgc

SEQ ID NO: 280598 - DNA, 20 bp, synthetic construct
  source 1..20: mol_type = other DNA
taccggtatgtgctaccacg

SEQ ID NO: 280599 - DNA, 20 bp, synthetic construct
  source 1..20: mol_type = other DNA
ctaccggtatgtgctaccac

SEQ ID NO: 280600 - DNA, 20 bp, synthetic construct
  source 1..20: mol_type = other DNA
actaccggtatgtgctacca

SEQ ID NO: 280601 - DNA, 20 bp, synthetic construct
  source 1..20: mol_type = other DNA
aactaccggtatgtgctacc

SEQ ID NO: 280602 - DNA, 20 bp, synthetic construct
  source 1..20: mol_type = other DNA
gaactaccggtatgtgctac

SEQ ID NO: 280603 - DNA, 20 bp, synthetic construct
  source 1..20: mol_type = other DNA
ggaactaccggtatgtgcta

SEQ ID NO: 280604 - DNA, 20 bp, synthetic construct
  source 1..20: mol_type = other DNA
tggaactaccggtatgtgct

SEQ ID NO: 280605 - DNA, 20 bp, synthetic construct
  source 1..20: mol_type = other DNA
ctggaactaccggtatgtgc

SEQ ID NO: 280606 - DNA, 20 bp, synthetic construct
  source 1..20: mol_type = other DNA
gctggaactaccggtatgtg

SEQ ID NO: 280607 - DNA, 20 bp, synthetic construct
  source 1..20: mol_type = other DNA
agctggaactaccggtatgt

SEQ ID NO: 280608 - DNA, 20 bp, synthetic construct
  source 1..20: mol_type = other DNA
tagctggaactaccggtatg

SEQ ID NO: 280609 - DNA, 20 bp, synthetic construct
  source 1..20: mol_type = other DNA
gtagctggaactaccggtat

SEQ ID NO: 280610 - DNA, 20 bp, synthetic construct
  source 1..20: mol_type = other DNA
agtagctggaactaccggta

SEQ ID NO: 280611 - DNA, 20 bp, synthetic construct
  source 1..20: mol_type = other DNA
aagtagctggaactaccggt

SEQ ID NO: 280612 - DNA, 20 bp, synthetic construct
  source 1..20: mol_type = other DNA
caagtagctggaactaccgg

SEQ ID NO: 280613 - DNA, 20 bp, synthetic construct
  source 1..20: mol_type = other DNA
ccaagtagctggaactaccg

SEQ ID NO: 280614 - DNA, 20 bp, synthetic construct
  source 1..20: mol_type = other DNA
cccaagtagctggaactacc

SEQ ID NO: 280615 - DNA, 20 bp, synthetic construct
  source 1..20: mol_type = other DNA
tcccaagtagctggaactac

SEQ ID NO: 280616 - DNA, 20 bp, synthetic construct
  source 1..20: mol_type = other DNA
ctcccaagtagctggaacta

SEQ ID NO: 280617 - DNA, 20 bp, synthetic construct
  source 1..20: mol_type = other DNA
tctcccaagtagctggaact

SEQ ID NO: 280618 - DNA, 20 bp, synthetic construct
  source 1..20: mol_type = other DNA
gtctcccaagtagctggaac

SEQ ID NO: 280619 - DNA, 20 bp, synthetic construct
  source 1..20: mol_type = other DNA
ggtctcccaagtagctggaa

SEQ ID NO: 280620 - DNA, 20 bp, synthetic construct
  source 1..20: mol_type = other DNA
cggtctcccaagtagctgga

SEQ ID NO: 280621 - DNA, 20 bp, synthetic construct
  source 1..20: mol_type = other DNA
tcggtctcccaagtagctgg

SEQ ID NO: 280622 - DNA, 20 bp, synthetic construct
  source 1..20: mol_type = other DNA
ctcggtctcccaagtagctg

SEQ ID NO: 280623 - DNA, 20 bp, synthetic construct
  source 1..20: mol_type = other DNA
cctcggtctcccaagtagct

SEQ ID NO: 280624 - DNA, 20 bp, synthetic construct
  source 1..20: mol_type = other DNA
gcctcggtctcccaagtagc

SEQ ID NO: 280625 - DNA, 20 bp, synthetic construct
  source 1..20: mol_type = other DNA
tgcctcggtctcccaagtag

SEQ ID NO: 280626 - DNA, 20 bp, synthetic construct
  source 1..20: mol_type = other DNA
ctgcctcggtctcccaagta

SEQ ID NO: 280627 - DNA, 20 bp, synthetic construct
  source 1..20: mol_type = other DNA
cctgcctcggtctcccaagt

SEQ ID NO: 280628 - DNA, 20 bp, synthetic construct
  source 1..20: mol_type = other DNA
tcctgcctcggtctcccaag

SEQ ID NO: 280629 - DNA, 20 bp, synthetic construct
  source 1..20: mol_type = other DNA
ctcctgcctcggtctcccaa

SEQ ID NO: 280630 - DNA, 20 bp, synthetic construct
  source 1..20: mol_type = other DNA
cctcctgcctcggtctccca

SEQ ID NO: 280631 - DNA, 20 bp, synthetic construct
  source 1..20: mol_type = other DNA
tcctcctgcctcggtctccc

SEQ ID NO: 280632 - DNA, 20 bp, synthetic construct
  source 1..20: mol_type = other DNA
atcctcctgcctcggtctcc

SEQ ID NO: 280633 - DNA, 20 bp, synthetic construct
  source 1..20: mol_type = other DNA
aatcctcctgcctcggtctc

SEQ ID NO: 280634 - DNA, 20 bp, synthetic construct
  source 1..20: mol_type = other DNA
caatcctcctgcctcggtct

SEQ ID NO: 280635 - DNA, 20 bp, synthetic construct
  source 1..20: mol_type = other DNA
gcaatcctcctgcctcggtc

SEQ ID NO: 280636 - DNA, 20 bp, synthetic construct
  source 1..20: mol_type = other DNA
agcaatcctcctgcctcggt

SEQ ID NO: 280637 - DNA, 20 bp, synthetic construct
  source 1..20: mol_type = other DNA
aagcaatcctcctgcctcgg

SEQ ID NO: 280638 - DNA, 20 bp, synthetic construct
  source 1..20: mol_type = other DNA
caagcaatcctcctgcctcg

SEQ ID NO: 280639 - DNA, 20 bp, synthetic construct
  source 1..20: mol_type = other DNA
tcaagcaatcctcctgcctc

SEQ ID NO: 280640 - DNA, 20 bp, synthetic construct
  source 1..20: mol_type = other DNA
ctcaagcaatcctcctgcct

SEQ ID NO: 280641 - DNA, 20 bp, synthetic construct
  source 1..20: mol_type = other DNA
gctcaagcaatcctcctgcc

SEQ ID NO: 280642 - DNA, 20 bp, synthetic construct
  source 1..20: mol_type = other DNA
ggctcaagcaatcctcctgc

SEQ ID NO: 280643 - DNA, 20 bp, synthetic construct
  source 1..20: mol_type = other DNA
gggctcaagcaatcctcctg

SEQ ID NO: 280644 - DNA, 20 bp, synthetic construct
  source 1..20: mol_type = other DNA
tgggctcaagcaatcctcct

SEQ ID NO: 280645 - DNA, 20 bp, synthetic construct
  source 1..20: mol_type = other DNA
ctgggctcaagcaatcctcc

SEQ ID NO: 280646 - DNA, 20 bp, synthetic construct
  source 1..20: mol_type = other DNA
cctgggctcaagcaatcctc

SEQ ID NO: 280647 - DNA, 20 bp, synthetic construct
  source 1..20: mol_type = other DNA
tcctgggctcaagcaatcct

SEQ ID NO: 280648 - DNA, 20 bp, synthetic construct
  source 1..20: mol_type = other DNA
ctcctgggctcaagcaatcc

SEQ ID NO: 280649 - DNA, 20 bp, synthetic construct
  source 1..20: mol_type = other DNA
actcctgggctcaagcaatc

SEQ ID NO: 280650 - DNA, 20 bp, synthetic construct
  source 1..20: mol_type = other DNA
aactcctgggctcaagcaat

SEQ ID NO: 280651 - DNA, 20 bp, synthetic construct
  source 1..20: mol_type = other DNA
aaactcctgggctcaagcaa

SEQ ID NO: 280652 - DNA, 20 bp, synthetic construct
  source 1..20: mol_type = other DNA
taaactcctgggctcaagca

SEQ ID NO: 280653 - DNA, 20 bp, synthetic construct
  source 1..20: mol_type = other DNA
ttaaactcctgggctcaagc

SEQ ID NO: 280654 - DNA, 20 bp, synthetic construct
  source 1..20: mol_type = other DNA
cttaaactcctgggctcaag

SEQ ID NO: 280655 - DNA, 20 bp, synthetic construct
  source 1..20: mol_type = other DNA
ccttaaactcctgggctcaa

SEQ ID NO: 280656 - DNA, 20 bp, synthetic construct
  source 1..20: mol_type = other DNA
gccttaaactcctgggctca

SEQ ID NO: 280657 - DNA, 20 bp, synthetic construct
  source 1..20: mol_type = other DNA
agccttaaactcctgggctc

SEQ ID NO: 280658 - DNA, 20 bp, synthetic construct
  source 1..20: mol_type = other DNA
cagccttaaactcctgggct

SEQ ID NO: 280659 - DNA, 20 bp, synthetic construct
  source 1..20: mol_type = other DNA
gcagccttaaactcctgggc

SEQ ID NO: 280660 - DNA, 20 bp, synthetic construct
  source 1..20: mol_type = other DNA
tgcagccttaaactcctggg

SEQ ID NO: 280661 - DNA, 20 bp, synthetic construct
  source 1..20: mol_type = other DNA
ctgcagccttaaactcctgg

SEQ ID NO: 280662 - DNA, 20 bp, synthetic construct
  source 1..20: mol_type = other DNA
actgcagccttaaactcctg

SEQ ID NO: 280663 - DNA, 20 bp, synthetic construct
  source 1..20: mol_type = other DNA
cactgcagccttaaactcct

SEQ ID NO: 280664 - DNA, 20 bp, synthetic construct
  source 1..20: mol_type = other DNA
tcactgcagccttaaactcc

SEQ ID NO: 280665 - DNA, 20 bp, synthetic construct
  source 1..20: mol_type = other DNA
ctcactgcagccttaaactc

SEQ ID NO: 280666 - DNA, 20 bp, synthetic construct
  source 1..20: mol_type = other DNA
gctcactgcagccttaaact

SEQ ID NO: 280667 - DNA, 20 bp, synthetic construct
  source 1..20: mol_type = other DNA
agctcactgcagccttaaac

SEQ ID NO: 280668 - DNA, 20 bp, synthetic construct
  source 1..20: mol_type = other DNA
tagctcactgcagccttaaa

SEQ ID NO: 280669 - DNA, 20 bp, synthetic construct
  source 1..20: mol_type = other DNA
gtagctcactgcagccttaa

SEQ ID NO: 280670 - DNA, 20 bp, synthetic construct
  source 1..20: mol_type = other DNA
cgtagctcactgcagcctta

SEQ ID NO: 280671 - DNA, 20 bp, synthetic construct
  source 1..20: mol_type = other DNA
tcgtagctcactgcagcctt

SEQ ID NO: 280672 - DNA, 20 bp, synthetic construct
  source 1..20: mol_type = other DNA
atcgtagctcactgcagcct

SEQ ID NO: 280673 - DNA, 20 bp, synthetic construct
  source 1..20: mol_type = other DNA
catcgtagctcactgcagcc

SEQ ID NO: 280674 - DNA, 20 bp, synthetic construct
  source 1..20: mol_type = other DNA
ccatcgtagctcactgcagc

SEQ ID NO: 280675 - DNA, 20 bp, synthetic construct
  source 1..20: mol_type = other DNA
gccatcgtagctcactgcag

SEQ ID NO: 280676 - DNA, 20 bp, synthetic construct
  source 1..20: mol_type = other DNA
cgccatcgtagctcactgca

SEQ ID NO: 280677 - DNA, 20 bp, synthetic construct
  source 1..20: mol_type = other DNA
gcgccatcgtagctcactgc

SEQ ID NO: 280678 - DNA, 20 bp, synthetic construct
  source 1..20: mol_type = other DNA
ggcgccatcgtagctcactg

SEQ ID NO: 280679 - DNA, 20 bp, synthetic construct
  source 1..20: mol_type = other DNA
tggcgccatcgtagctcact

SEQ ID NO: 280680 - DNA, 20 bp, synthetic construct
  source 1..20: mol_type = other DNA
gtggcgccatcgtagctcac

SEQ ID NO: 280681 - DNA, 20 bp, synthetic construct
  source 1..20: mol_type = other DNA
agtggcgccatcgtagctca

SEQ ID NO: 280682 - DNA, 20 bp, synthetic construct
  source 1..20: mol_type = other DNA
cagtggcgccatcgtagctc

SEQ ID NO: 280683 - DNA, 20 bp, synthetic construct
  source 1..20: mol_type = other DNA
gcagtggcgccatcgtagct

SEQ ID NO: 280684 - DNA, 20 bp, synthetic construct
  source 1..20: mol_type = other DNA
tgcagtggcgccatcgtagc

SEQ ID NO: 280685 - DNA, 20 bp, synthetic construct
  source 1..20: mol_type = other DNA
atgcagtggcgccatcgtag

SEQ ID NO: 280686 - DNA, 20 bp, synthetic construct
  source 1..20: mol_type = other DNA
aatgcagtggcgccatcgta

SEQ ID NO: 280687 - DNA, 20 bp, synthetic construct
  source 1..20: mol_type = other DNA
gaatgcagtggcgccatcgt

SEQ ID NO: 280688 - DNA, 20 bp, synthetic construct
  source 1..20: mol_type = other DNA
ggaatgcagtggcgccatcg

SEQ ID NO: 280689 - DNA, 20 bp, synthetic construct
  source 1..20: mol_type = other DNA
tggaatgcagtggcgccatc

SEQ ID NO: 280690 - DNA, 20 bp, synthetic construct
  source 1..20: mol_type = other DNA
ctggaatgcagtggcgccat

SEQ ID NO: 280691 - DNA, 20 bp, synthetic construct
  source 1..20: mol_type = other DNA
gctggaatgcagtggcgcca

SEQ ID NO: 280692 - DNA, 20 bp, synthetic construct
  source 1..20: mol_type = other DNA
ggctggaatgcagtggcgcc

SEQ ID NO: 280693 - DNA, 20 bp, synthetic construct
  source 1..20: mol_type = other DNA
aggctggaatgcagtggcgc

SEQ ID NO: 280694 - DNA, 20 bp, synthetic construct
  source 1..20: mol_type = other DNA
caggctggaatgcagtggcg

SEQ ID NO: 280695 - DNA, 20 bp, synthetic construct
  source 1..20: mol_type = other DNA
ccaggctggaatgcagtggc

SEQ ID NO: 280696 - DNA, 20 bp, synthetic construct
  source 1..20: mol_type = other DNA
cccaggctggaatgcagtgg

SEQ ID NO: 280697 - DNA, 20 bp, synthetic construct
  source 1..20: mol_type = other DNA
acccaggctggaatgcagtg

SEQ ID NO: 280698 - DNA, 20 bp, synthetic construct
  source 1..20: mol_type = other DNA
cacccaggctggaatgcagt

SEQ ID NO: 280699 - DNA, 20 bp, synthetic construct
  source 1..20: mol_type = other DNA
tcacccaggctggaatgcag

SEQ ID NO: 280700 - DNA, 20 bp, synthetic construct
  source 1..20: mol_type = other DNA
gtcacccaggctggaatgca

SEQ ID NO: 280701 - DNA, 20 bp, synthetic construct
  source 1..20: mol_type = other DNA
tgtcacccaggctggaatgc

SEQ ID NO: 280702 - DNA, 20 bp, synthetic construct
  source 1..20: mol_type = other DNA
ctgtcacccaggctggaatg

SEQ ID NO: 280703 - DNA, 20 bp, synthetic construct
  source 1..20: mol_type = other DNA
tctgtcacccaggctggaat

SEQ ID NO: 280704 - DNA, 20 bp, synthetic construct
  source 1..20: mol_type = other DNA
ctctgtcacccaggctggaa

SEQ ID NO: 280705 - DNA, 20 bp, synthetic construct
  source 1..20: mol_type = other DNA
actctgtcacccaggctgga

SEQ ID NO: 280706 - DNA, 20 bp, synthetic construct
  source 1..20: mol_type = other DNA
cactctgtcacccaggctgg

SEQ ID NO: 280707 - DNA, 20 bp, synthetic construct
  source 1..20: mol_type = other DNA
tcactctgtcacccaggctg

SEQ ID NO: 280708 - DNA, 20 bp, synthetic construct
  source 1..20: mol_type = other DNA
ctcactctgtcacccaggct

SEQ ID NO: 280709 - DNA, 20 bp, synthetic construct
  source 1..20: mol_type = other DNA
tctcactctgtcacccaggc

SEQ ID NO: 280710 - DNA, 20 bp, synthetic construct
  source 1..20: mol_type = other DNA
ctctcactctgtcacccagg

SEQ ID NO: 280711 - DNA, 20 bp, synthetic construct
  source 1..20: mol_type = other DNA
gctctcactctgtcacccag

SEQ ID NO: 280712 - DNA, 20 bp, synthetic construct
  source 1..20: mol_type = other DNA
agctctcactctgtcaccca

SEQ ID NO: 280713 - DNA, 20 bp, synthetic construct
  source 1..20: mol_type = other DNA
aagctctcactctgtcaccc

SEQ ID NO: 280714 - DNA, 20 bp, synthetic construct
  source 1..20: mol_type = other DNA
caagctctcactctgtcacc

SEQ ID NO: 280715 - DNA, 20 bp, synthetic construct
  source 1..20: mol_type = other DNA
acaagctctcactctgtcac

SEQ ID NO: 280716 - DNA, 20 bp, synthetic construct
  source 1..20: mol_type = other DNA
gacaagctctcactctgtca

SEQ ID NO: 280717 - DNA, 20 bp, synthetic construct
  source 1..20: mol_type = other DNA
agacaagctctcactctgtc

SEQ ID NO: 280718 - DNA, 20 bp, synthetic construct
  source 1..20: mol_type = other DNA
gagacaagctctcactctgt

SEQ ID NO: 280719 - DNA, 20 bp, synthetic construct
  source 1..20: mol_type = other DNA
agagacaagctctcactctg

SEQ ID NO: 280720 - DNA, 20 bp, synthetic construct
  source 1..20: mol_type = other DNA
tagagacaagctctcactct

SEQ ID NO: 280721 - DNA, 20 bp, synthetic construct
  source 1..20: mol_type = other DNA
atagagacaagctctcactc

SEQ ID NO: 280722 - DNA, 20 bp, synthetic construct
  source 1..20: mol_type = other DNA
aatagagacaagctctcact

SEQ ID NO: 280723 - DNA, 20 bp, synthetic construct
  source 1..20: mol_type = other DNA
aaatagagacaagctctcac

SEQ ID NO: 280724 - DNA, 20 bp, synthetic construct
  source 1..20: mol_type = other DNA
aaaatagagacaagctctca

SEQ ID NO: 280725 - DNA, 20 bp, synthetic construct
  source 1..20: mol_type = other DNA
taaaatagagacaagctctc

SEQ ID NO: 280726 - DNA, 20 bp, synthetic construct
  source 1..20: mol_type = other DNA
ttaaaatagagacaagctct

SEQ ID NO: 280727 - DNA, 20 bp, synthetic construct
  source 1..20: mol_type = other DNA
tttaaaatagagacaagctc

SEQ ID NO: 280728 - DNA, 20 bp, synthetic construct
  source 1..20: mol_type = other DNA
ttttaaaatagagacaagct

SEQ ID NO: 280729 - DNA, 20 bp, synthetic construct
  source 1..20: mol_type = other DNA
tttttaaaatagagacaagc

SEQ ID NO: 280730 - DNA, 20 bp, synthetic construct
  source 1..20: mol_type = other DNA
atttttaaaatagagacaag

SEQ ID NO: 280731 - DNA, 20 bp, synthetic construct
  source 1..20: mol_type = other DNA
tatttttaaaatagagacaa

SEQ ID NO: 280732 - DNA, 20 bp, synthetic construct
  source 1..20: mol_type = other DNA
ttatttttaaaatagagaca

SEQ ID NO: 280733 - DNA, 20 bp, synthetic construct
  source 1..20: mol_type = other DNA
attatttttaaaatagagac

SEQ ID NO: 280734 - DNA, 20 bp, synthetic construct
  source 1..20: mol_type = other DNA
tattatttttaaaatagaga

SEQ ID NO: 280735 - DNA, 20 bp, synthetic construct
  source 1..20: mol_type = other DNA
ttattatttttaaaatagag

SEQ ID NO: 280736 - DNA, 20 bp, synthetic construct
  source 1..20: mol_type = other DNA
tttattatttttaaaataga

SEQ ID NO: 280737 - DNA, 20 bp, synthetic construct
  source 1..20: mol_type = other DNA
ttttattatttttaaaatag

SEQ ID NO: 280738 - DNA, 20 bp, synthetic construct
  source 1..20: mol_type = other DNA
tttttattatttttaaaata

SEQ ID NO: 280739 - DNA, 20 bp, synthetic construct
  source 1..20: mol_type = other DNA
ctttttattatttttaaaat

SEQ ID NO: 280740 - DNA, 20 bp, synthetic construct
  source 1..20: mol_type = other DNA
tctttttattatttttaaaa

SEQ ID NO: 280741 - DNA, 20 bp, synthetic construct
  source 1..20: mol_type = other DNA
ttctttttattatttttaaa

SEQ ID NO: 280742 - DNA, 20 bp, synthetic construct
  source 1..20: mol_type = other DNA
attctttttattatttttaa

SEQ ID NO: 280743 - DNA, 20 bp, synthetic construct
  source 1..20: mol_type = other DNA
tattctttttattattttta

SEQ ID NO: 280744 - DNA, 20 bp, synthetic construct
  source 1..20: mol_type = other DNA
ttattctttttattattttt

SEQ ID NO: 280745 - DNA, 20 bp, synthetic construct
  source 1..20: mol_type = other DNA
tttattctttttattatttt

SEQ ID NO: 280746 - DNA, 20 bp, synthetic construct
  source 1..20: mol_type = other DNA
atttattctttttattattt

SEQ ID NO: 280747 - DNA, 20 bp, synthetic construct
  source 1..20: mol_type = other DNA
tatttattctttttattatt

SEQ ID NO: 280748 - DNA, 20 bp, synthetic construct
  source 1..20: mol_type = other DNA
ttatttattctttttattat

SEQ ID NO: 280749 - DNA, 20 bp, synthetic construct
  source 1..20: mol_type = other DNA
tttatttattctttttatta

SEQ ID NO: 280750 - DNA, 20 bp, synthetic construct
  source 1..20: mol_type = other DNA
ttttatttattctttttatt

SEQ ID NO: 280751 - DNA, 20 bp, synthetic construct
  source 1..20: mol_type = other DNA
tttttatttattctttttat

SEQ ID NO: 280752 - DNA, 20 bp, synthetic construct
  source 1..20: mol_type = other DNA
atttttatttattcttttta

SEQ ID NO: 280753 - DNA, 20 bp, synthetic construct
  source 1..20: mol_type = other DNA
tatttttatttattcttttt

SEQ ID NO: 280754 - DNA, 20 bp, synthetic construct
  source 1..20: mol_type = other DNA
ttatttttatttattctttt

SEQ ID NO: 280755 - DNA, 20 bp, synthetic construct
  source 1..20: mol_type = other DNA
tttatttttatttattcttt

SEQ ID NO: 280756 - DNA, 20 bp, synthetic construct
  source 1..20: mol_type = other DNA
atttatttttatttattctt

SEQ ID NO: 280757 - DNA, 20 bp, synthetic construct
  source 1..20: mol_type = other DNA
aatttatttttatttattct

SEQ ID NO: 280758 - DNA, 20 bp, synthetic construct
  source 1..20: mol_type = other DNA
taatttatttttatttattc

SEQ ID NO: 280759 - DNA, 20 bp, synthetic construct
  source 1..20: mol_type = other DNA
ttaatttatttttatttatt

SEQ ID NO: 280760 - DNA, 20 bp, synthetic construct
  source 1..20: mol_type = other DNA
tttaatttatttttatttat

SEQ ID NO: 280761 - DNA, 20 bp, synthetic construct
  source 1..20: mol_type = other DNA
ttttaatttatttttattta

SEQ ID NO: 280762 - DNA, 20 bp, synthetic construct
  source 1..20: mol_type = other DNA
attttaatttatttttattt

SEQ ID NO: 280763 - DNA, 20 bp, synthetic construct
  source 1..20: mol_type = other DNA
cattttaatttatttttatt

SEQ ID NO: 280764 - DNA, 20 bp, synthetic construct
  source 1..20: mol_type = other DNA
acattttaatttatttttat

SEQ ID NO: 280765 - DNA, 20 bp, synthetic construct
  source 1..20: mol_type = other DNA
tacattttaatttattttta

SEQ ID NO: 280766 - DNA, 20 bp, synthetic construct
  source 1..20: mol_type = other DNA
ttacattttaatttattttt

SEQ ID NO: 280767 - DNA, 20 bp, synthetic construct
  source 1..20: mol_type = other DNA
tttacattttaatttatttt

SEQ ID NO: 280768 - DNA, 20 bp, synthetic construct
  source 1..20: mol_type = other DNA
atttacattttaatttattt

SEQ ID NO: 280769 - DNA, 20 bp, synthetic construct
  source 1..20: mol_type = other DNA
tatttacattttaatttatt

SEQ ID NO: 280770 - DNA, 20 bp, synthetic construct
  source 1..20: mol_type = other DNA
atatttacattttaatttat

SEQ ID NO: 280771 - DNA, 20 bp, synthetic construct
  source 1..20: mol_type = other DNA
catatttacattttaattta

SEQ ID NO: 280772 - DNA, 20 bp, synthetic construct
  source 1..20: mol_type = other DNA
acatatttacattttaattt

SEQ ID NO: 280773 - DNA, 20 bp, synthetic construct
  source 1..20: mol_type = other DNA
cacatatttacattttaatt

SEQ ID NO: 280774 - DNA, 20 bp, synthetic construct
  source 1..20: mol_type = other DNA
gcacatatttacattttaat

SEQ ID NO: 280775 - DNA, 20 bp, synthetic construct
  source 1..20: mol_type = other DNA
tgcacatatttacattttaa

SEQ ID NO: 280776 - DNA, 20 bp, synthetic construct
  source 1..20: mol_type = other DNA
atgcacatatttacatttta

SEQ ID NO: 280777 - DNA, 20 bp, synthetic construct
  source 1..20: mol_type = other DNA
catgcacatatttacatttt

SEQ ID NO: 280778 - DNA, 20 bp, synthetic construct
  source 1..20: mol_type = other DNA
acatgcacatatttacattt

SEQ ID NO: 280779 - DNA, 20 bp, synthetic construct
  source 1..20: mol_type = other DNA
aacatgcacatatttacatt

SEQ ID NO: 280780 - DNA, 20 bp, synthetic construct
  source 1..20: mol_type = other DNA
taacatgcacatatttacat

SEQ ID NO: 280781 - DNA, 20 bp, synthetic construct
  source 1..20: mol_type = other DNA
ctaacatgcacatatttaca

SEQ ID NO: 280782 - DNA, 20 bp, synthetic construct
  source 1..20: mol_type = other DNA
tctaacatgcacatatttac

SEQ ID NO: 280783 - DNA, 20 bp, synthetic construct
  source 1..20: mol_type = other DNA
ttctaacatgcacatattta

SEQ ID NO: 280784 - DNA, 20 bp, synthetic construct
  source 1..20: mol_type = other DNA
tttctaacatgcacatattt

SEQ ID NO: 280785 - DNA, 20 bp, synthetic construct
  source 1..20: mol_type = other DNA
ttttctaacatgcacatatt

SEQ ID NO: 280786 - DNA, 20 bp, synthetic construct
  source 1..20: mol_type = other DNA
tttttctaacatgcacatat

SEQ ID NO: 280787 - DNA, 20 bp, synthetic construct
  source 1..20: mol_type = other DNA
ttttttctaacatgcacata

SEQ ID NO: 280788 - DNA, 20 bp, synthetic construct
  source 1..20: mol_type = other DNA
attttttctaacatgcacat

SEQ ID NO: 280789 - DNA, 20 bp, synthetic construct
  source 1..20: mol_type = other DNA
tattttttctaacatgcaca

SEQ ID NO: 280790 - DNA, 20 bp, synthetic construct
  source 1..20: mol_type = other DNA
gtattttttctaacatgcac

SEQ ID NO: 280791 - DNA, 20 bp, synthetic construct
  source 1..20: mol_type = other DNA
tgtattttttctaacatgca

SEQ ID NO: 280792 - DNA, 20 bp, synthetic construct
  source 1..20: mol_type = other DNA
gtgtattttttctaacatgc

SEQ ID NO: 280793 - DNA, 20 bp, synthetic construct
  source 1..20: mol_type = other DNA
ggtgtattttttctaacatg

SEQ ID NO: 280794 - DNA, 20 bp, synthetic construct
  source 1..20: mol_type = other DNA
gggtgtattttttctaacat

SEQ ID NO: 280795 - DNA, 20 bp, synthetic construct
  source 1..20: mol_type = other DNA
tgggtgtattttttctaaca

SEQ ID NO: 280796 - DNA, 20 bp, synthetic construct
  source 1..20: mol_type = other DNA
atgggtgtattttttctaac

SEQ ID NO: 280797 - DNA, 20 bp, synthetic construct
  source 1..20: mol_type = other DNA
gatgggtgtattttttctaa

SEQ ID NO: 280798 - DNA, 20 bp, synthetic construct
  source 1..20: mol_type = other DNA
tgatgggtgtattttttcta

SEQ ID NO: 280799 - DNA, 20 bp, synthetic construct
  source 1..20: mol_type = other DNA
ctgatgggtgtattttttct

SEQ ID NO: 280800 - DNA, 20 bp, synthetic construct
  source 1..20: mol_type = other DNA
gctgatgggtgtattttttc

SEQ ID NO: 280801 - DNA, 20 bp, synthetic construct
  source 1..20: mol_type = other DNA
tgctgatgggtgtatttttt

SEQ ID NO: 280802 - DNA, 20 bp, synthetic construct
  source 1..20: mol_type = other DNA
ttgctgatgggtgtattttt

SEQ ID NO: 280803 - DNA, 20 bp, synthetic construct
  source 1..20: mol_type = other DNA
tttgctgatgggtgtatttt

SEQ ID NO: 280804 - DNA, 20 bp, synthetic construct
  source 1..20: mol_type = other DNA
ttttgctgatgggtgtattt

SEQ ID NO: 280805 - DNA, 20 bp, synthetic construct
  source 1..20: mol_type = other DNA
tttttgctgatgggtgtatt

SEQ ID NO: 280806 - DNA, 20 bp, synthetic construct
  source 1..20: mol_type = other DNA
ctttttgctgatgggtgtat

SEQ ID NO: 280807 - DNA, 20 bp, synthetic construct
  source 1..20: mol_type = other DNA
cctttttgctgatgggtgta

SEQ ID NO: 280808 - DNA, 20 bp, synthetic construct
  source 1..20: mol_type = other DNA
ccctttttgctgatgggtgt

SEQ ID NO: 280809 - DNA, 20 bp, synthetic construct
  source 1..20: mol_type = other DNA
cccctttttgctgatgggtg

SEQ ID NO: 280810 - DNA, 20 bp, synthetic construct
  source 1..20: mol_type = other DNA
ccccctttttgctgatgggt

SEQ ID NO: 280811 - DNA, 20 bp, synthetic construct
  source 1..20: mol_type = other DNA
accccctttttgctgatggg

SEQ ID NO: 280812 - DNA, 20 bp, synthetic construct
  source 1..20: mol_type = other DNA
taccccctttttgctgatgg

SEQ ID NO: 280813 - DNA, 20 bp, synthetic construct
  source 1..20: mol_type = other DNA
ttaccccctttttgctgatg

SEQ ID NO: 280814 - DNA, 20 bp, synthetic construct
  source 1..20: mol_type = other DNA
tttaccccctttttgctgat

SEQ ID NO: 280815 - DNA, 20 bp, synthetic construct
  source 1..20: mol_type = other DNA
ctttaccccctttttgctga

SEQ ID NO: 280816 - DNA, 20 bp, synthetic construct
  source 1..20: mol_type = other DNA
cctttaccccctttttgctg

SEQ ID NO: 280817 - DNA, 20 bp, synthetic construct
  source 1..20: mol_type = other DNA
tcctttaccccctttttgct

SEQ ID NO: 280818 - DNA, 20 bp, synthetic construct
  source 1..20: mol_type = other DNA
ctcctttaccccctttttgc

SEQ ID NO: 280819 - DNA, 20 bp, synthetic construct
  source 1..20: mol_type = other DNA
gctcctttaccccctttttg

SEQ ID NO: 280820 - DNA, 20 bp, synthetic construct
  source 1..20: mol_type = other DNA
cgctcctttacccccttttt

SEQ ID NO: 280821 - DNA, 20 bp, synthetic construct
  source 1..20: mol_type = other DNA
tcgctcctttaccccctttt

SEQ ID NO: 280822 - DNA, 20 bp, synthetic construct
  source 1..20: mol_type = other DNA
atcgctcctttacccccttt

SEQ ID NO: 280823 - DNA, 20 bp, synthetic construct
  source 1..20: mol_type = other DNA
aatcgctcctttaccccctt

SEQ ID NO: 280824 - DNA, 20 bp, synthetic construct
  source 1..20: mol_type = other DNA
aaatcgctcctttaccccct

SEQ ID NO: 280825 - DNA, 20 bp, synthetic construct
  source 1..20: mol_type = other DNA
gaaatcgctcctttaccccc

SEQ ID NO: 280826 - DNA, 20 bp, synthetic construct
  source 1..20: mol_type = other DNA
tgaaatcgctcctttacccc

SEQ ID NO: 280827 - DNA, 20 bp, synthetic construct
  source 1..20: mol_type = other DNA
ctgaaatcgctcctttaccc

SEQ ID NO: 280828 - DNA, 20 bp, synthetic construct
  source 1..20: mol_type = other DNA
actgaaatcgctcctttacc

SEQ ID NO: 280829 - DNA, 20 bp, synthetic construct
  source 1..20: mol_type = other DNA
gactgaaatcgctcctttac

SEQ ID NO: 280830 - DNA, 20 bp, synthetic construct
  source 1..20: mol_type = other DNA
tgactgaaatcgctccttta

SEQ ID NO: 280831 - DNA, 20 bp, synthetic construct
  source 1..20: mol_type = other DNA
atgactgaaatcgctccttt

SEQ ID NO: 280832 - DNA, 20 bp, synthetic construct
  source 1..20: mol_type = other DNA
tatgactgaaatcgctcctt

SEQ ID NO: 280833 - DNA, 20 bp, synthetic construct
  source 1..20: mol_type = other DNA
ttatgactgaaatcgctcct

SEQ ID NO: 280834 - DNA, 20 bp, synthetic construct
  source 1..20: mol_type = other DNA
attatgactgaaatcgctcc

SEQ ID NO: 280835 - DNA, 20 bp, synthetic construct
  source 1..20: mol_type = other DNA
aattatgactgaaatcgctc

SEQ ID NO: 280836 - DNA, 20 bp, synthetic construct
  source 1..20: mol_type = other DNA
caattatgactgaaatcgct

SEQ ID NO: 280837 - DNA, 20 bp, synthetic construct
  source 1..20: mol_type = other DNA
ccaattatgactgaaatcgc

SEQ ID NO: 280838 - DNA, 20 bp, synthetic construct
  source 1..20: mol_type = other DNA
tccaattatgactgaaatcg

SEQ ID NO: 280839 - DNA, 20 bp, synthetic construct
  source 1..20: mol_type = other DNA
ctccaattatgactgaaatc

SEQ ID NO: 280840 - DNA, 20 bp, synthetic construct
  source 1..20: mol_type = other DNA
tctccaattatgactgaaat

SEQ ID NO: 280841 - DNA, 20 bp, synthetic construct
  source 1..20: mol_type = other DNA
ctctccaattatgactgaaa

SEQ ID NO: 280842 - DNA, 20 bp, synthetic construct
  source 1..20: mol_type = other DNA
tctctccaattatgactgaa

SEQ ID NO: 280843 - DNA, 20 bp, synthetic construct
  source 1..20: mol_type = other DNA
atctctccaattatgactga

SEQ ID NO: 280844 - DNA, 20 bp, synthetic construct
  source 1..20: mol_type = other DNA
catctctccaattatgactg

SEQ ID NO: 280845 - DNA, 20 bp, synthetic construct
  source 1..20: mol_type = other DNA
gcatctctccaattatgact

SEQ ID NO: 280846 - DNA, 20 bp, synthetic construct
  source 1..20: mol_type = other DNA
tgcatctctccaattatgac

SEQ ID NO: 280847 - DNA, 20 bp, synthetic construct
  source 1..20: mol_type = other DNA
ctgcatctctccaattatga

SEQ ID NO: 280848 - DNA, 20 bp, synthetic construct
  source 1..20: mol_type = other DNA
tctgcatctctccaattatg

SEQ ID NO: 280849 - DNA, 20 bp, synthetic construct
  source 1..20: mol_type = other DNA
ttctgcatctctccaattat

SEQ ID NO: 280850 - DNA, 20 bp, synthetic construct
  source 1..20: mol_type = other DNA
attctgcatctctccaatta

SEQ ID NO: 280851 - DNA, 20 bp, synthetic construct
  source 1..20: mol_type = other DNA
tattctgcatctctccaatt

SEQ ID NO: 280852 - DNA, 20 bp, synthetic construct
  source 1..20: mol_type = other DNA
ttattctgcatctctccaat

SEQ ID NO: 280853 - DNA, 20 bp, synthetic construct
  source 1..20: mol_type = other DNA
cttattctgcatctctccaa

SEQ ID NO: 280854 - DNA, 20 bp, synthetic construct
  source 1..20: mol_type = other DNA
gcttattctgcatctctcca

SEQ ID NO: 280855 - DNA, 20 bp, synthetic construct
  source 1..20: mol_type = other DNA
ggcttattctgcatctctcc

SEQ ID NO: 280856 - DNA, 20 bp, synthetic construct
  source 1..20: mol_type = other DNA
tggcttattctgcatctctc

SEQ ID NO: 280857 - DNA, 20 bp, synthetic construct
  source 1..20: mol_type = other DNA
ctggcttattctgcatctct

SEQ ID NO: 280858 - DNA, 20 bp, synthetic construct
  source 1..20: mol_type = other DNA
gctggcttattctgcatctc

SEQ ID NO: 280859 - DNA, 20 bp, synthetic construct
  source 1..20: mol_type = other DNA
tgctggcttattctgcatct

SEQ ID NO: 280860 - DNA, 20 bp, synthetic construct
  source 1..20: mol_type = other DNA
ttgctggcttattctgcatc

SEQ ID NO: 280861 - DNA, 20 bp, synthetic construct
  source 1..20: mol_type = other DNA
attgctggcttattctgcat

SEQ ID NO: 280862 - DNA, 20 bp, synthetic construct
  source 1..20: mol_type = other DNA
cattgctggcttattctgca

SEQ ID NO: 280863 - DNA, 20 bp, synthetic construct
  source 1..20: mol_type = other DNA
gcattgctggcttattctgc

SEQ ID NO: 280864 - DNA, 20 bp, synthetic construct
  source 1..20: mol_type = other DNA
tgcattgctggcttattctg

SEQ ID NO: 280865 - DNA, 20 bp, synthetic construct
  source 1..20: mol_type = other DNA
ctgcattgctggcttattct

SEQ ID NO: 280866 - DNA, 20 bp, synthetic construct
  source 1..20: mol_type = other DNA
actgcattgctggcttattc

SEQ ID NO: 280867 - DNA, 20 bp, synthetic construct
  source 1..20: mol_type = other DNA
aactgcattgctggcttatt

SEQ ID NO: 280868 - DNA, 20 bp, synthetic construct
  source 1..20: mol_type = other DNA
aaactgcattgctggcttat

SEQ ID NO: 280869 - DNA, 20 bp, synthetic construct
  source 1..20: mol_type = other DNA
gaaactgcattgctggctta

SEQ ID NO: 280870 - DNA, 20 bp, synthetic construct
  source 1..20: mol_type = other DNA
agaaactgcattgctggctt

SEQ ID NO: 280871 - DNA, 20 bp, synthetic construct
  source 1..20: mol_type = other DNA
aagaaactgcattgctggct

SEQ ID NO: 280872 - DNA, 20 bp, synthetic construct
  source 1..20: mol_type = other DNA
aaagaaactgcattgctggc

SEQ ID NO: 280873 - DNA, 20 bp, synthetic construct
  source 1..20: mol_type = other DNA
aaaagaaactgcattgctgg

SEQ ID NO: 280874 - DNA, 20 bp, synthetic construct
  source 1..20: mol_type = other DNA
taaaagaaactgcattgctg

SEQ ID NO: 280875 - DNA, 20 bp, synthetic construct
  source 1..20: mol_type = other DNA
ataaaagaaactgcattgct

SEQ ID NO: 280876 - DNA, 20 bp, synthetic construct
  source 1..20: mol_type = other DNA
aataaaagaaactgcattgc

SEQ ID NO: 280877 - DNA, 20 bp, synthetic construct
  source 1..20: mol_type = other DNA
aaataaaagaaactgcattg

SEQ ID NO: 280878 - DNA, 20 bp, synthetic construct
  source 1..20: mol_type = other DNA
aaaataaaagaaactgcatt

SEQ ID NO: 280879 - DNA, 20 bp, synthetic construct
  source 1..20: mol_type = other DNA
caaaataaaagaaactgcat

SEQ ID NO: 280880 - DNA, 20 bp, synthetic construct
  source 1..20: mol_type = other DNA
ccaaaataaaagaaactgca

SEQ ID NO: 280881 - DNA, 20 bp, synthetic construct
  source 1..20: mol_type = other DNA
accaaaataaaagaaactgc

SEQ ID NO: 280882 - DNA, 20 bp, synthetic construct
  source 1..20: mol_type = other DNA
gaccaaaataaaagaaactg

SEQ ID NO: 280883 - DNA, 20 bp, synthetic construct
  source 1..20: mol_type = other DNA
tgaccaaaataaaagaaact

SEQ ID NO: 280884 - DNA, 20 bp, synthetic construct
  source 1..20: mol_type = other DNA
ttgaccaaaataaaagaaac

SEQ ID NO: 280885 - DNA, 20 bp, synthetic construct
  source 1..20: mol_type = other DNA
tttgaccaaaataaaagaaa

SEQ ID NO: 280886 - DNA, 20 bp, synthetic construct
  source 1..20: mol_type = other DNA
ttttgaccaaaataaaagaa

SEQ ID NO: 280887 - DNA, 20 bp, synthetic construct
  source 1..20: mol_type = other DNA
tttttgaccaaaataaaaga

SEQ ID NO: 280888 - DNA, 20 bp, synthetic construct
  source 1..20: mol_type = other DNA
ttttttgaccaaaataaaag

SEQ ID NO: 280889 - DNA, 20 bp, synthetic construct
  source 1..20: mol_type = other DNA
tttttttgaccaaaataaaa

SEQ ID NO: 280890 - DNA, 20 bp, synthetic construct
  source 1..20: mol_type = other DNA
ttttttttgaccaaaataaa

SEQ ID NO: 280891 - DNA, 20 bp, synthetic construct
  source 1..20: mol_type = other DNA
attttttttgaccaaaataa

SEQ ID NO: 280892 - DNA, 20 bp, synthetic construct
  source 1..20: mol_type = other DNA
tattttttttgaccaaaata

SEQ ID NO: 280893 - DNA, 20 bp, synthetic construct
  source 1..20: mol_type = other DNA
ttattttttttgaccaaaat

SEQ ID NO: 280894 - DNA, 20 bp, synthetic construct
  source 1..20: mol_type = other DNA
cttattttttttgaccaaaa

SEQ ID NO: 280895 - DNA, 20 bp, synthetic construct
  source 1..20: mol_type = other DNA
gcttattttttttgaccaaa

SEQ ID NO: 280896 - DNA, 20 bp, synthetic construct
  source 1..20: mol_type = other DNA
tgcttattttttttgaccaa

SEQ ID NO: 280897 - DNA, 20 bp, synthetic construct
  source 1..20: mol_type = other DNA
ttgcttattttttttgacca

SEQ ID NO: 280898 - DNA, 20 bp, synthetic construct
  source 1..20: mol_type = other DNA
tttgcttattttttttgacc

SEQ ID NO: 280899 - DNA, 20 bp, synthetic construct
  source 1..20: mol_type = other DNA
ttttgcttattttttttgac

SEQ ID NO: 280900 - DNA, 20 bp, synthetic construct
  source 1..20: mol_type = other DNA
gttttgcttattttttttga

SEQ ID NO: 280901 - DNA, 20 bp, synthetic construct
  source 1..20: mol_type = other DNA
tgttttgcttattttttttg

SEQ ID NO: 280902 - DNA, 20 bp, synthetic construct
  source 1..20: mol_type = other DNA
ttgttttgcttatttttttt

SEQ ID NO: 280903 - DNA, 20 bp, synthetic construct
  source 1..20: mol_type = other DNA
attgttttgcttattttttt

SEQ ID NO: 280904 - DNA, 20 bp, synthetic construct
  source 1..20: mol_type = other DNA
cattgttttgcttatttttt

SEQ ID NO: 280905 - DNA, 20 bp, synthetic construct
  source 1..20: mol_type = other DNA
acattgttttgcttattttt

SEQ ID NO: 280906 - DNA, 20 bp, synthetic construct
  source 1..20: mol_type = other DNA
aacattgttttgcttatttt

SEQ ID NO: 280907 - DNA, 20 bp, synthetic construct
  source 1..20: mol_type = other DNA
caacattgttttgcttattt

SEQ ID NO: 280908 - DNA, 20 bp, synthetic construct
  source 1..20: mol_type = other DNA
acaacattgttttgcttatt

SEQ ID NO: 280909 - DNA, 20 bp, synthetic construct
  source 1..20: mol_type = other DNA
tacaacattgttttgcttat

SEQ ID NO: 280910 - DNA, 20 bp, synthetic construct
  source 1..20: mol_type = other DNA
ttacaacattgttttgctta

SEQ ID NO: 280911 - DNA, 20 bp, synthetic construct
  source 1..20: mol_type = other DNA
tttacaacattgttttgctt

SEQ ID NO: 280912 - DNA, 20 bp, synthetic construct
  source 1..20: mol_type = other DNA
gtttacaacattgttttgct

SEQ ID NO: 280913 - DNA, 20 bp, synthetic construct
  source 1..20: mol_type = other DNA
tgtttacaacattgttttgc

SEQ ID NO: 280914 - DNA, 20 bp, synthetic construct
  source 1..20: mol_type = other DNA
gtgtttacaacattgttttg

SEQ ID NO: 280915 - DNA, 20 bp, synthetic construct
  source 1..20: mol_type = other DNA
ggtgtttacaacattgtttt

SEQ ID NO: 280916 - DNA, 20 bp, synthetic construct
  source 1..20: mol_type = other DNA
gggtgtttacaacattgttt

SEQ ID NO: 280917 - DNA, 20 bp, synthetic construct
  source 1..20: mol_type = other DNA
tgggtgtttacaacattgtt

SEQ ID NO: 280918 - DNA, 20 bp, synthetic construct
  source 1..20: mol_type = other DNA
ctgggtgtttacaacattgt

SEQ ID NO: 280919 - DNA, 20 bp, synthetic construct
  source 1..20: mol_type = other DNA
actgggtgtttacaacattg

SEQ ID NO: 280920 - DNA, 20 bp, synthetic construct
  source 1..20: mol_type = other DNA
cactgggtgtttacaacatt

SEQ ID NO: 280921 - DNA, 20 bp, synthetic construct
  source 1..20: mol_type = other DNA
gcactgggtgtttacaacat

SEQ ID NO: 280922 - DNA, 20 bp, synthetic construct
  source 1..20: mol_type = other DNA
agcactgggtgtttacaaca

SEQ ID NO: 280923 - DNA, 20 bp, synthetic construct
  source 1..20: mol_type = other DNA
cagcactgggtgtttacaac

SEQ ID NO: 280924 - DNA, 20 bp, synthetic construct
  source 1..20: mol_type = other DNA
ccagcactgggtgtttacaa

SEQ ID NO: 280925 - DNA, 20 bp, synthetic construct
  source 1..20: mol_type = other DNA
gccagcactgggtgtttaca

SEQ ID NO: 280926 - DNA, 20 bp, synthetic construct
  source 1..20: mol_type = other DNA
tgccagcactgggtgtttac

SEQ ID NO: 280927 - DNA, 20 bp, synthetic construct
  source 1..20: mol_type = other DNA
ctgccagcactgggtgttta

SEQ ID NO: 280928 - DNA, 20 bp, synthetic construct
  source 1..20: mol_type = other DNA
gctgccagcactgggtgttt

SEQ ID NO: 280929 - DNA, 20 bp, synthetic construct
  source 1..20: mol_type = other DNA
tgctgccagcactgggtgtt

SEQ ID NO: 280930 - DNA, 20 bp, synthetic construct
  source 1..20: mol_type = other DNA
ttgctgccagcactgggtgt

SEQ ID NO: 280931 - DNA, 20 bp, synthetic construct
  source 1..20: mol_type = other DNA
attgctgccagcactgggtg

SEQ ID NO: 280932 - DNA, 20 bp, synthetic construct
  source 1..20: mol_type = other DNA
cattgctgccagcactgggt

SEQ ID NO: 280933 - DNA, 20 bp, synthetic construct
  source 1..20: mol_type = other DNA
acattgctgccagcactggg

SEQ ID NO: 280934 - DNA, 20 bp, synthetic construct
  source 1..20: mol_type = other DNA
cacattgctgccagcactgg

SEQ ID NO: 280935 - DNA, 20 bp, synthetic construct
  source 1..20: mol_type = other DNA
ccacattgctgccagcactg

SEQ ID NO: 280936 - DNA, 20 bp, synthetic construct
  source 1..20: mol_type = other DNA
accacattgctgccagcact

SEQ ID NO: 280937 - DNA, 20 bp, synthetic construct
  source 1..20: mol_type = other DNA
caccacattgctgccagcac

SEQ ID NO: 280938 - DNA, 20 bp, synthetic construct
  source 1..20: mol_type = other DNA
tcaccacattgctgccagca

SEQ ID NO: 280939 - DNA, 20 bp, synthetic construct
  source 1..20: mol_type = other DNA
ctcaccacattgctgccagc

SEQ ID NO: 280940 - DNA, 20 bp, synthetic construct
  source 1..20: mol_type = other DNA
cctcaccacattgctgccag

SEQ ID NO: 280941 - DNA, 20 bp, synthetic construct
  source 1..20: mol_type = other DNA
gcctcaccacattgctgcca

SEQ ID NO: 280942 - DNA, 20 bp, synthetic construct
  source 1..20: mol_type = other DNA
agcctcaccacattgctgcc

SEQ ID NO: 280943 - DNA, 20 bp, synthetic construct
  source 1..20: mol_type = other DNA
cagcctcaccacattgctgc

SEQ ID NO: 280944 - DNA, 20 bp, synthetic construct
  source 1..20: mol_type = other DNA
ccagcctcaccacattgctg

SEQ ID NO: 280945 - DNA, 20 bp, synthetic construct
  source 1..20: mol_type = other DNA
gccagcctcaccacattgct

SEQ ID NO: 280946 - DNA, 20 bp, synthetic construct
  source 1..20: mol_type = other DNA
agccagcctcaccacattgc

SEQ ID NO: 280947 - DNA, 20 bp, synthetic construct
  source 1..20: mol_type = other DNA
gagccagcctcaccacattg

SEQ ID NO: 280948 - DNA, 20 bp, synthetic construct
  source 1..20: mol_type = other DNA
agagccagcctcaccacatt

SEQ ID NO: 280949 - DNA, 20 bp, synthetic construct
  source 1..20: mol_type = other DNA
gagagccagcctcaccacat

SEQ ID NO: 280950 - DNA, 20 bp, synthetic construct
  source 1..20: mol_type = other DNA
agagagccagcctcaccaca

SEQ ID NO: 280951 - DNA, 20 bp, synthetic construct
  source 1..20: mol_type = other DNA
gagagagccagcctcaccac

SEQ ID NO: 280952 - DNA, 20 bp, synthetic construct
  source 1..20: mol_type = other DNA
tgagagagccagcctcacca

SEQ ID NO: 280953 - DNA, 20 bp, synthetic construct
  source 1..20: mol_type = other DNA
gtgagagagccagcctcacc

SEQ ID NO: 280954 - DNA, 20 bp, synthetic construct
  source 1..20: mol_type = other DNA
ggtgagagagccagcctcac

SEQ ID NO: 280955 - DNA, 20 bp, synthetic construct
  source 1..20: mol_type = other DNA
tggtgagagagccagcctca

SEQ ID NO: 280956 - DNA, 20 bp, synthetic construct
  source 1..20: mol_type = other DNA
ctggtgagagagccagcctc

SEQ ID NO: 280957 - DNA, 20 bp, synthetic construct
  source 1..20: mol_type = other DNA
cctggtgagagagccagcct

SEQ ID NO: 280958 - DNA, 20 bp, synthetic construct
  source 1..20: mol_type = other DNA
ccctggtgagagagccagcc

SEQ ID NO: 280959 - DNA, 20 bp, synthetic construct
  source 1..20: mol_type = other DNA
gccctggtgagagagccagc

SEQ ID NO: 280960 - DNA, 20 bp, synthetic construct
  source 1..20: mol_type = other DNA
agccctggtgagagagccag

SEQ ID NO: 280961 - DNA, 20 bp, synthetic construct
  source 1..20: mol_type = other DNA
gagccctggtgagagagcca

SEQ ID NO: 280962 - DNA, 20 bp, synthetic construct
  source 1..20: mol_type = other DNA
tgagccctggtgagagagcc

SEQ ID NO: 280963 - DNA, 20 bp, synthetic construct
  source 1..20: mol_type = other DNA
gtgagccctggtgagagagc

SEQ ID NO: 280964 - DNA, 20 bp, synthetic construct
  source 1..20: mol_type = other DNA
tgtgagccctggtgagagag

SEQ ID NO: 280965 - DNA, 20 bp, synthetic construct
  source 1..20: mol_type = other DNA
ctgtgagccctggtgagaga

SEQ ID NO: 280966 - DNA, 20 bp, synthetic construct
  source 1..20: mol_type = other DNA
cctgtgagccctggtgagag

SEQ ID NO: 280967 - DNA, 20 bp, synthetic construct
  source 1..20: mol_type = other DNA
ccctgtgagccctggtgaga

SEQ ID NO: 280968 - DNA, 20 bp, synthetic construct
  source 1..20: mol_type = other DNA
tccctgtgagccctggtgag

SEQ ID NO: 280969 - DNA, 20 bp, synthetic construct
  source 1..20: mol_type = other DNA
ttccctgtgagccctggtga

SEQ ID NO: 280970 - DNA, 20 bp, synthetic construct
  source 1..20: mol_type = other DNA
tttccctgtgagccctggtg

SEQ ID NO: 280971 - DNA, 20 bp, synthetic construct
  source 1..20: mol_type = other DNA
ttttccctgtgagccctggt

SEQ ID NO: 280972 - DNA, 20 bp, synthetic construct
  source 1..20: mol_type = other DNA
gttttccctgtgagccctgg

SEQ ID NO: 280973 - DNA, 20 bp, synthetic construct
  source 1..20: mol_type = other DNA
agttttccctgtgagccctg

SEQ ID NO: 280974 - DNA, 20 bp, synthetic construct
  source 1..20: mol_type = other DNA
gagttttccctgtgagccct

SEQ ID NO: 280975 - DNA, 20 bp, synthetic construct
  source 1..20: mol_type = other DNA
tgagttttccctgtgagccc

SEQ ID NO: 280976 - DNA, 20 bp, synthetic construct
  source 1..20: mol_type = other DNA
atgagttttccctgtgagcc

SEQ ID NO: 280977 - DNA, 20 bp, synthetic construct
  source 1..20: mol_type = other DNA
catgagttttccctgtgagc

SEQ ID NO: 280978 - DNA, 20 bp, synthetic construct
  source 1..20: mol_type = other DNA
gcatgagttttccctgtgag

SEQ ID NO: 280979 - DNA, 20 bp, synthetic construct
  source 1..20: mol_type = other DNA
tgcatgagttttccctgtga

SEQ ID NO: 280980 - DNA, 20 bp, synthetic construct
  source 1..20: mol_type = other DNA
ttgcatgagttttccctgtg

SEQ ID NO: 280981 - DNA, 20 bp, synthetic construct
  source 1..20: mol_type = other DNA
gttgcatgagttttccctgt

SEQ ID NO: 280982 - DNA, 20 bp, synthetic construct
  source 1..20: mol_type = other DNA
ggttgcatgagttttccctg

SEQ ID NO: 280983 - DNA, 20 bp, synthetic construct
  source 1..20: mol_type = other DNA
gggttgcatgagttttccct

SEQ ID NO: 280984 - DNA, 20 bp, synthetic construct
  source 1..20: mol_type = other DNA
agggttgcatgagttttccc

SEQ ID NO: 280985 - DNA, 20 bp, synthetic construct
  source 1..20: mol_type = other DNA
aagggttgcatgagttttcc

SEQ ID NO: 280986 - DNA, 20 bp, synthetic construct
  source 1..20: mol_type = other DNA
aaagggttgcatgagttttc

SEQ ID NO: 280987 - DNA, 20 bp, synthetic construct
  source 1..20: mol_type = other DNA
aaaagggttgcatgagtttt

SEQ ID NO: 280988 - DNA, 20 bp, synthetic construct
  source 1..20: mol_type = other DNA
taaaagggttgcatgagttt

SEQ ID NO: 280989 - DNA, 20 bp, synthetic construct
  source 1..20: mol_type = other DNA
ctaaaagggttgcatgagtt

SEQ ID NO: 280990 - DNA, 20 bp, synthetic construct
  source 1..20: mol_type = other DNA
tctaaaagggttgcatgagt

SEQ ID NO: 280991 - DNA, 20 bp, synthetic construct
  source 1..20: mol_type = other DNA
ttctaaaagggttgcatgag

SEQ ID NO: 280992 - DNA, 20 bp, synthetic construct
  source 1..20: mol_type = other DNA
tttctaaaagggttgcatga

SEQ ID NO: 280993 - DNA, 20 bp, synthetic construct
  source 1..20: mol_type = other DNA
ctttctaaaagggttgcatg

SEQ ID NO: 280994 - DNA, 20 bp, synthetic construct
  source 1..20: mol_type = other DNA
gctttctaaaagggttgcat

SEQ ID NO: 280995 - DNA, 20 bp, synthetic construct
  source 1..20: mol_type = other DNA
ggctttctaaaagggttgca

SEQ ID NO: 280996 - DNA, 20 bp, synthetic construct
  source 1..20: mol_type = other DNA
tggctttctaaaagggttgc

SEQ ID NO: 280997 - DNA, 20 bp, synthetic construct
  source 1..20: mol_type = other DNA
atggctttctaaaagggttg

SEQ ID NO: 280998 - DNA, 20 bp, synthetic construct
  source 1..20: mol_type = other DNA
catggctttctaaaagggtt

SEQ ID NO: 280999 - DNA, 20 bp, synthetic construct
  source 1..20: mol_type = other DNA
acatggctttctaaaagggt

SEQ ID NO: 281000 - DNA, 20 bp, synthetic construct
  source 1..20: mol_type = other DNA
cacatggctttctaaaaggg

SEQ ID NO: 281001 - DNA, 20 bp, synthetic construct
  source 1..20: mol_type = other DNA
ccacatggctttctaaaagg

SEQ ID NO: 281002 - DNA, 20 bp, synthetic construct
  source 1..20: mol_type = other DNA
tccacatggctttctaaaag

SEQ ID NO: 281003 - DNA, 20 bp, synthetic construct
  source 1..20: mol_type = other DNA
ctccacatggctttctaaaa

SEQ ID NO: 281004 - DNA, 20 bp, synthetic construct
  source 1..20: mol_type = other DNA
tctccacatggctttctaaa

SEQ ID NO: 281005 - DNA, 20 bp, synthetic construct
  source 1..20: mol_type = other DNA
ctctccacatggctttctaa

SEQ ID NO: 281006 - DNA, 20 bp, synthetic construct
  source 1..20: mol_type = other DNA
actctccacatggctttcta

SEQ ID NO: 281007 - DNA, 20 bp, synthetic construct
  source 1..20: mol_type = other DNA
aactctccacatggctttct

SEQ ID NO: 281008 - DNA, 20 bp, synthetic construct
  source 1..20: mol_type = other DNA
caactctccacatggctttc

SEQ ID NO: 281009 - DNA, 20 bp, synthetic construct
  source 1..20: mol_type = other DNA
acaactctccacatggcttt

SEQ ID NO: 281010 - DNA, 20 bp, synthetic construct
  source 1..20: mol_type = other DNA
tacaactctccacatggctt

SEQ ID NO: 281011 - DNA, 20 bp, synthetic construct
  source 1..20: mol_type = other DNA
gtacaactctccacatggct

SEQ ID NO: 281012 - DNA, 20 bp, synthetic construct
  source 1..20: mol_type = other DNA
ggtacaactctccacatggc

SEQ ID NO: 281013 - DNA, 20 bp, synthetic construct
  source 1..20: mol_type = other DNA
cggtacaactctccacatgg

SEQ ID NO: 281014 - DNA, 20 bp, synthetic construct
  source 1..20: mol_type = other DNA
tcggtacaactctccacatg

SEQ ID NO: 281015 - DNA, 20 bp, synthetic construct
  source 1..20: mol_type = other DNA
ctcggtacaactctccacat

SEQ ID NO: 281016 - DNA, 20 bp, synthetic construct
  source 1..20: mol_type = other DNA
tctcggtacaactctccaca

SEQ ID NO: 281017 - DNA, 20 bp, synthetic construct
  source 1..20: mol_type = other DNA
ctctcggtacaactctccac

SEQ ID NO: 281018 - DNA, 20 bp, synthetic construct
  source 1..20: mol_type = other DNA
cctctcggtacaactctcca

SEQ ID NO: 281019 - DNA, 20 bp, synthetic construct
  source 1..20: mol_type = other DNA
acctctcggtacaactctcc

SEQ ID NO: 281020 - DNA, 20 bp, synthetic construct
  source 1..20: mol_type = other DNA
aacctctcggtacaactctc

SEQ ID NO: 281021 - DNA, 20 bp, synthetic construct
  source 1..20: mol_type = other DNA
aaacctctcggtacaactct

SEQ ID NO: 281022 - DNA, 20 bp, synthetic construct
  source 1..20: mol_type = other DNA
aaaacctctcggtacaactc

SEQ ID NO: 281023 - DNA, 20 bp, synthetic construct
  source 1..20: mol_type = other DNA
taaaacctctcggtacaact

SEQ ID NO: 281024 - DNA, 20 bp, synthetic construct
  source 1..20: mol_type = other DNA
ctaaaacctctcggtacaac

SEQ ID NO: 281025 - DNA, 20 bp, synthetic construct
  source 1..20: mol_type = other DNA
tctaaaacctctcggtacaa

SEQ ID NO: 281026 - DNA, 20 bp, synthetic construct
  source 1..20: mol_type = other DNA
ttctaaaacctctcggtaca

SEQ ID NO: 281027 - DNA, 20 bp, synthetic construct
  source 1..20: mol_type = other DNA
attctaaaacctctcggtac

SEQ ID NO: 281028 - DNA, 20 bp, synthetic construct
  source 1..20: mol_type = other DNA
tattctaaaacctctcggta

SEQ ID NO: 281029 - DNA, 20 bp, synthetic construct
  source 1..20: mol_type = other DNA
atattctaaaacctctcggt

SEQ ID NO: 281030 - DNA, 20 bp, synthetic construct
  source 1..20: mol_type = other DNA
aatattctaaaacctctcgg

SEQ ID NO: 281031 - DNA, 20 bp, synthetic construct
  source 1..20: mol_type = other DNA
aaatattctaaaacctctcg

SEQ ID NO: 281032 - DNA, 20 bp, synthetic construct
  source 1..20: mol_type = other DNA
taaatattctaaaacctctc

SEQ ID NO: 281033 - DNA, 20 bp, synthetic construct
  source 1..20: mol_type = other DNA
ataaatattctaaaacctct

SEQ ID NO: 281034 - DNA, 20 bp, synthetic construct
  source 1..20: mol_type = other DNA
tataaatattctaaaacctc

SEQ ID NO: 281035 - DNA, 20 bp, synthetic construct
  source 1..20: mol_type = other DNA
ttataaatattctaaaacct

SEQ ID NO: 281036 - DNA, 20 bp, synthetic construct
  source 1..20: mol_type = other DNA
gttataaatattctaaaacc

SEQ ID NO: 281037 - DNA, 20 bp, synthetic construct
  source 1..20: mol_type = other DNA
agttataaatattctaaaac

SEQ ID NO: 281038 - DNA, 20 bp, synthetic construct
  source 1..20: mol_type = other DNA
aagttataaatattctaaaa

SEQ ID NO: 281039 - DNA, 20 bp, synthetic construct
  source 1..20: mol_type = other DNA
aaagttataaatattctaaa

SEQ ID NO: 281040 - DNA, 20 bp, synthetic construct
  source 1..20: mol_type = other DNA
caaagttataaatattctaa

SEQ ID NO: 281041 - DNA, 20 bp, synthetic construct
  source 1..20: mol_type = other DNA
tcaaagttataaatattcta

SEQ ID NO: 281042 - DNA, 20 bp, synthetic construct
  source 1..20: mol_type = other DNA
gtcaaagttataaatattct

SEQ ID NO: 281043 - DNA, 20 bp, synthetic construct
  source 1..20: mol_type = other DNA
ggtcaaagttataaatattc

SEQ ID NO: 281044 - DNA, 20 bp, synthetic construct
  source 1..20: mol_type = other DNA
gggtcaaagttataaatatt

SEQ ID NO: 281045 - DNA, 20 bp, synthetic construct
  source 1..20: mol_type = other DNA
tgggtcaaagttataaatat

SEQ ID NO: 281046 - DNA, 20 bp, synthetic construct
  source 1..20: mol_type = other DNA
ctgggtcaaagttataaata

SEQ ID NO: 281047 - DNA, 20 bp, synthetic construct
  source 1..20: mol_type = other DNA
tctgggtcaaagttataaat

SEQ ID NO: 281048 - DNA, 20 bp, synthetic construct
  source 1..20: mol_type = other DNA
ttctgggtcaaagttataaa

SEQ ID NO: 281049 - DNA, 20 bp, synthetic construct
  source 1..20: mol_type = other DNA
tttctgggtcaaagttataa

SEQ ID NO: 281050 - DNA, 20 bp, synthetic construct
  source 1..20: mol_type = other DNA
atttctgggtcaaagttata

SEQ ID NO: 281051 - DNA, 20 bp, synthetic construct
  source 1..20: mol_type = other DNA
aatttctgggtcaaagttat

SEQ ID NO: 281052 - DNA, 20 bp, synthetic construct
  source 1..20: mol_type = other DNA
gaatttctgggtcaaagtta

SEQ ID NO: 281053 - DNA, 20 bp, synthetic construct
  source 1..20: mol_type = other DNA
agaatttctgggtcaaagtt

SEQ ID NO: 281054 - DNA, 20 bp, synthetic construct
  source 1..20: mol_type = other DNA
tagaatttctgggtcaaagt

SEQ ID NO: 281055 - DNA, 20 bp, synthetic construct
  source 1..20: mol_type = other DNA
atagaatttctgggtcaaag

SEQ ID NO: 281056 - DNA, 20 bp, synthetic construct
  source 1..20: mol_type = other DNA
aatagaatttctgggtcaaa

SEQ ID NO: 281057 - DNA, 20 bp, synthetic construct
  source 1..20: mol_type = other DNA
gaatagaatttctgggtcaa

SEQ ID NO: 281058 - DNA, 20 bp, synthetic construct
  source 1..20: mol_type = other DNA
agaatagaatttctgggtca

SEQ ID NO: 281059 - DNA, 20 bp, synthetic construct
  source 1..20: mol_type = other DNA
tagaatagaatttctgggtc

SEQ ID NO: 281060 - DNA, 20 bp, synthetic construct
  source 1..20: mol_type = other DNA
ctagaatagaatttctgggt

SEQ ID NO: 281061 - DNA, 20 bp, synthetic construct
  source 1..20: mol_type = other DNA
cctagaatagaatttctggg

SEQ ID NO: 281062 - DNA, 20 bp, synthetic construct
  source 1..20: mol_type = other DNA
tcctagaatagaatttctgg

SEQ ID NO: 281063 - DNA, 20 bp, synthetic construct
  source 1..20: mol_type = other DNA
gtcctagaatagaatttctg

SEQ ID NO: 281064 - DNA, 20 bp, synthetic construct
  source 1..20: mol_type = other DNA
agtcctagaatagaatttct

SEQ ID NO: 281065 - DNA, 20 bp, synthetic construct
  source 1..20: mol_type = other DNA
gagtcctagaatagaatttc

SEQ ID NO: 281066 - DNA, 20 bp, synthetic construct
  source 1..20: mol_type = other DNA
agagtcctagaatagaattt

SEQ ID NO: 281067 - DNA, 20 bp, synthetic construct
  source 1..20: mol_type = other DNA
cagagtcctagaatagaatt

SEQ ID NO: 281068 - DNA, 20 bp, synthetic construct
  source 1..20: mol_type = other DNA
acagagtcctagaatagaat

SEQ ID NO: 281069 - DNA, 20 bp, synthetic construct
  source 1..20: mol_type = other DNA
cacagagtcctagaatagaa

SEQ ID NO: 281070 - DNA, 20 bp, synthetic construct
  source 1..20: mol_type = other DNA
acacagagtcctagaataga

SEQ ID NO: 281071 - DNA, 20 bp, synthetic construct
  source 1..20: mol_type = other DNA
aacacagagtcctagaatag

SEQ ID NO: 281072 - DNA, 20 bp, synthetic construct
  source 1..20: mol_type = other DNA
taacacagagtcctagaata

SEQ ID NO: 281073 - DNA, 20 bp, synthetic construct
  source 1..20: mol_type = other DNA
ataacacagagtcctagaat

SEQ ID NO: 281074 - DNA, 20 bp, synthetic construct
  source 1..20: mol_type = other DNA
cataacacagagtcctagaa

SEQ ID NO: 281075 - DNA, 20 bp, synthetic construct
  source 1..20: mol_type = other DNA
tcataacacagagtcctaga

SEQ ID NO: 281076 - DNA, 20 bp, synthetic construct
  source 1..20: mol_type = other DNA
ttcataacacagagtcctag

SEQ ID NO: 281077 - DNA, 20 bp, synthetic construct
  source 1..20: mol_type = other DNA
tttcataacacagagtccta

SEQ ID NO: 281078 - DNA, 20 bp, synthetic construct
  source 1..20: mol_type = other DNA
ttttcataacacagagtcct

SEQ ID NO: 281079 - DNA, 20 bp, synthetic construct
  source 1..20: mol_type = other DNA
attttcataacacagagtcc

SEQ ID NO: 281080 - DNA, 20 bp, synthetic construct
  source 1..20: mol_type = other DNA
tattttcataacacagagtc

SEQ ID NO: 281081 - DNA, 20 bp, synthetic construct
  source 1..20: mol_type = other DNA
ttattttcataacacagagt

SEQ ID NO: 281082 - DNA, 20 bp, synthetic construct
  source 1..20: mol_type = other DNA
gttattttcataacacagag

SEQ ID NO: 281083 - DNA, 20 bp, synthetic construct
  source 1..20: mol_type = other DNA
ggttattttcataacacaga

SEQ ID NO: 281084 - DNA, 20 bp, synthetic construct
  source 1..20: mol_type = other DNA
gggttattttcataacacag

SEQ ID NO: 281085 - DNA, 20 bp, synthetic construct
  source 1..20: mol_type = other DNA
tgggttattttcataacaca

SEQ ID NO: 281086 - DNA, 20 bp, synthetic construct
  source 1..20: mol_type = other DNA
atgggttattttcataacac

SEQ ID NO: 281087 - DNA, 20 bp, synthetic construct
  source 1..20: mol_type = other DNA
gatgggttattttcataaca

SEQ ID NO: 281088 - DNA, 20 bp, synthetic construct
  source 1..20: mol_type = other DNA
tgatgggttattttcataac

SEQ ID NO: 281089 - DNA, 20 bp, synthetic construct
  source 1..20: mol_type = other DNA
atgatgggttattttcataa

SEQ ID NO: 281090 - DNA, 20 bp, synthetic construct
  source 1..20: mol_type = other DNA
tatgatgggttattttcata

SEQ ID NO: 281091 - DNA, 20 bp, synthetic construct
  source 1..20: mol_type = other DNA
atatgatgggttattttcat

SEQ ID NO: 281092 - DNA, 20 bp, synthetic construct
  source 1..20: mol_type = other DNA
catatgatgggttattttca

SEQ ID NO: 281093 - DNA, 20 bp, synthetic construct
  source 1..20: mol_type = other DNA
ccatatgatgggttattttc

SEQ ID NO: 281094 - DNA, 20 bp, synthetic construct
  source 1..20: mol_type = other DNA
tccatatgatgggttatttt

SEQ ID NO: 281095 - DNA, 20 bp, synthetic construct
  source 1..20: mol_type = other DNA
ttccatatgatgggttattt

SEQ ID NO: 281096 - DNA, 20 bp, synthetic construct
  source 1..20: mol_type = other DNA
tttccatatgatgggttatt

SEQ ID NO: 281097 - DNA, 20 bp, synthetic construct
  source 1..20: mol_type = other DNA
ttttccatatgatgggttat

SEQ ID NO: 281098 - DNA, 20 bp, synthetic construct
  source 1..20: mol_type = other DNA
tttttccatatgatgggtta

SEQ ID NO: 281099 - DNA, 20 bp, synthetic construct
  source 1..20: mol_type = other DNA
ctttttccatatgatgggtt

SEQ ID NO: 281100 - DNA, 20 bp, synthetic construct
  source 1..20: mol_type = other DNA
gctttttccatatgatgggt

SEQ ID NO: 281101 - DNA, 20 bp, synthetic construct
  source 1..20: mol_type = other DNA
agctttttccatatgatggg

SEQ ID NO: 281102 - DNA, 20 bp, synthetic construct
  source 1..20: mol_type = other DNA
gagctttttccatatgatgg

SEQ ID NO: 281103 - DNA, 20 bp, synthetic construct
  source 1..20: mol_type = other DNA
ggagctttttccatatgatg

SEQ ID NO: 281104 - DNA, 20 bp, synthetic construct
  source 1..20: mol_type = other DNA
aggagctttttccatatgat

SEQ ID NO: 281105 - DNA, 20 bp, synthetic construct
  source 1..20: mol_type = other DNA
aaggagctttttccatatga

SEQ ID NO: 281106 - DNA, 20 bp, synthetic construct
  source 1..20: mol_type = other DNA
aaaggagctttttccatatg

SEQ ID NO: 281107 - DNA, 20 bp, synthetic construct
  source 1..20: mol_type = other DNA
gaaaggagctttttccatat

SEQ ID NO: 281108 - DNA, 20 bp, synthetic construct
  source 1..20: mol_type = other DNA
tgaaaggagctttttccata

SEQ ID NO: 281109 - DNA, 20 bp, synthetic construct
  source 1..20: mol_type = other DNA
ctgaaaggagctttttccat

SEQ ID NO: 281110 - DNA, 20 bp, synthetic construct
  source 1..20: mol_type = other DNA
tctgaaaggagctttttcca

SEQ ID NO: 281111 - DNA, 20 bp, synthetic construct
  source 1..20: mol_type = other DNA
ttctgaaaggagctttttcc

SEQ ID NO: 281112 - DNA, 20 bp, synthetic construct
  source 1..20: mol_type = other DNA
tttctgaaaggagctttttc

SEQ ID NO: 281113 - DNA, 20 bp, synthetic construct
  source 1..20: mol_type = other DNA
ctttctgaaaggagcttttt

SEQ ID NO: 281114 - DNA, 20 bp, synthetic construct
  source 1..20: mol_type = other DNA
tctttctgaaaggagctttt

SEQ ID NO: 281115 - DNA, 20 bp, synthetic construct
  source 1..20: mol_type = other DNA
ctctttctgaaaggagcttt

SEQ ID NO: 281116 - DNA, 20 bp, synthetic construct
  source 1..20: mol_type = other DNA
cctctttctgaaaggagctt

SEQ ID NO: 281117 - DNA, 20 bp, synthetic construct
  source 1..20: mol_type = other DNA
acctctttctgaaaggagct

SEQ ID NO: 281118 - DNA, 20 bp, synthetic construct
  source 1..20: mol_type = other DNA
aacctctttctgaaaggagc

SEQ ID NO: 281119 - DNA, 20 bp, synthetic construct
  source 1..20: mol_type = other DNA
gaacctctttctgaaaggag

SEQ ID NO: 281120 - DNA, 20 bp, synthetic construct
  source 1..20: mol_type = other DNA
tgaacctctttctgaaagga

SEQ ID NO: 281121 - DNA, 20 bp, synthetic construct
  source 1..20: mol_type = other DNA
atgaacctctttctgaaagg

SEQ ID NO: 281122 - DNA, 20 bp, synthetic construct
  source 1..20: mol_type = other DNA
catgaacctctttctgaaag

SEQ ID NO: 281123 - DNA, 20 bp, synthetic construct
  source 1..20: mol_type = other DNA
ccatgaacctctttctgaaa

SEQ ID NO: 281124 - DNA, 20 bp, synthetic construct
  source 1..20: mol_type = other DNA
cccatgaacctctttctgaa

SEQ ID NO: 281125 - DNA, 20 bp, synthetic construct
  source 1..20: mol_type = other DNA
tcccatgaacctctttctga

SEQ ID NO: 281126 - DNA, 20 bp, synthetic construct
  source 1..20: mol_type = other DNA
ctcccatgaacctctttctg

SEQ ID NO: 281127 - DNA, 20 bp, synthetic construct
  source 1..20: mol_type = other DNA
cctcccatgaacctctttct

SEQ ID NO: 281128 - DNA, 20 bp, synthetic construct
  source 1..20: mol_type = other DNA
gcctcccatgaacctctttc

SEQ ID NO: 281129 - DNA, 20 bp, synthetic construct
  source 1..20: mol_type = other DNA
agcctcccatgaacctcttt

SEQ ID NO: 281130 - DNA, 20 bp, synthetic construct
  source 1..20: mol_type = other DNA
cagcctcccatgaacctctt

SEQ ID NO: 281131 - DNA, 20 bp, synthetic construct
  source 1..20: mol_type = other DNA
acagcctcccatgaacctct

SEQ ID NO: 281132 - DNA, 20 bp, synthetic construct
  source 1..20: mol_type = other DNA
aacagcctcccatgaacctc

SEQ ID NO: 281133 - DNA, 20 bp, synthetic construct
  source 1..20: mol_type = other DNA
aaacagcctcccatgaacct

SEQ ID NO: 281134 - DNA, 20 bp, synthetic construct
  source 1..20: mol_type = other DNA
caaacagcctcccatgaacc

SEQ ID NO: 281135 - DNA, 20 bp, synthetic construct
  source 1..20: mol_type = other DNA
acaaacagcctcccatgaac

SEQ ID NO: 281136 - DNA, 20 bp, synthetic construct
  source 1..20: mol_type = other DNA
tacaaacagcctcccatgaa

SEQ ID NO: 281137 - DNA, 20 bp, synthetic construct
  source 1..20: mol_type = other DNA
atacaaacagcctcccatga

SEQ ID NO: 281138 - DNA, 20 bp, synthetic construct
  source 1..20: mol_type = other DNA
aatacaaacagcctcccatg

SEQ ID NO: 281139 - DNA, 20 bp, synthetic construct
  source 1..20: mol_type = other DNA
aaatacaaacagcctcccat

SEQ ID NO: 281140 - DNA, 20 bp, synthetic construct
  source 1..20: mol_type = other DNA
aaaatacaaacagcctccca

SEQ ID NO: 281141 - DNA, 20 bp, synthetic construct
  source 1..20: mol_type = other DNA
aaaaatacaaacagcctccc

SEQ ID NO: 281142 - DNA, 20 bp, synthetic construct
  source 1..20: mol_type = other DNA
aaaaaatacaaacagcctcc

SEQ ID NO: 281143 - DNA, 20 bp, synthetic construct
  source 1..20: mol_type = other DNA
aaaaaaatacaaacagcctc

SEQ ID NO: 281144 - DNA, 20 bp, synthetic construct
  source 1..20: mol_type = other DNA
aaaaaaaatacaaacagcct

SEQ ID NO: 281145 - DNA, 20 bp, synthetic construct
  source 1..20: mol_type = other DNA
aaaaaaaaatacaaacagcc

SEQ ID NO: 281146 - DNA, 20 bp, synthetic construct
  source 1..20: mol_type = other DNA
aaaaaaaaaatacaaacagc

SEQ ID NO: 281147 - DNA, 20 bp, synthetic construct
  source 1..20: mol_type = other DNA
gaaaaaaaaaatacaaacag

SEQ ID NO: 281148 - DNA, 20 bp, synthetic construct
  source 1..20: mol_type = other DNA
agaaaaaaaaaatacaaaca

SEQ ID NO: 281149 - DNA, 20 bp, synthetic construct
  source 1..20: mol_type = other DNA
aagaaaaaaaaaatacaaac

SEQ ID NO: 281150 - DNA, 20 bp, synthetic construct
  source 1..20: mol_type = other DNA
aaagaaaaaaaaaatacaaa

SEQ ID NO: 281151 - DNA, 20 bp, synthetic construct
  source 1..20: mol_type = other DNA
caaagaaaaaaaaaatacaa

SEQ ID NO: 281152 - DNA, 20 bp, synthetic construct
  source 1..20: mol_type = other DNA
gcaaagaaaaaaaaaataca

SEQ ID NO: 281153 - DNA, 20 bp, synthetic construct
  source 1..20: mol_type = other DNA
tgcaaagaaaaaaaaaatac

SEQ ID NO: 281154 - DNA, 20 bp, synthetic construct
  source 1..20: mol_type = other DNA
atgcaaagaaaaaaaaaata

SEQ ID NO: 281155 - DNA, 20 bp, synthetic construct
  source 1..20: mol_type = other DNA
gatgcaaagaaaaaaaaaat

SEQ ID NO: 281156 - DNA, 20 bp, synthetic construct
  source 1..20: mol_type = other DNA
tgatgcaaagaaaaaaaaaa

SEQ ID NO: 281157 - DNA, 20 bp, synthetic construct
  source 1..20: mol_type = other DNA
ttgatgcaaagaaaaaaaaa

SEQ ID NO: 281158 - DNA, 20 bp, synthetic construct
  source 1..20: mol_type = other DNA
tttgatgcaaagaaaaaaaa

SEQ ID NO: 281159 - DNA, 20 bp, synthetic construct
  source 1..20: mol_type = other DNA
atttgatgcaaagaaaaaaa

SEQ ID NO: 281160 - DNA, 20 bp, synthetic construct
  source 1..20: mol_type = other DNA
gatttgatgcaaagaaaaaa

SEQ ID NO: 281161 - DNA, 20 bp, synthetic construct
  source 1..20: mol_type = other DNA
ggatttgatgcaaagaaaaa

SEQ ID NO: 281162 - DNA, 20 bp, synthetic construct
  source 1..20: mol_type = other DNA
tggatttgatgcaaagaaaa

SEQ ID NO: 281163 - DNA, 20 bp, synthetic construct
  source 1..20: mol_type = other DNA
ctggatttgatgcaaagaaa

SEQ ID NO: 281164 - DNA, 20 bp, synthetic construct
  source 1..20: mol_type = other DNA
gctggatttgatgcaaagaa

SEQ ID NO: 281165 - DNA, 20 bp, synthetic construct
  source 1..20: mol_type = other DNA
agctggatttgatgcaaaga

SEQ ID NO: 281166 - DNA, 20 bp, synthetic construct
  source 1..20: mol_type = other DNA
gagctggatttgatgcaaag

SEQ ID NO: 281167 - DNA, 20 bp, synthetic construct
  source 1..20: mol_type = other DNA
ggagctggatttgatgcaaa

SEQ ID NO: 281168 - DNA, 20 bp, synthetic construct
  source 1..20: mol_type = other DNA
aggagctggatttgatgcaa

SEQ ID NO: 281169 - DNA, 20 bp, synthetic construct
  source 1..20: mol_type = other DNA
caggagctggatttgatgca

SEQ ID NO: 281170 - DNA, 20 bp, synthetic construct
  source 1..20: mol_type = other DNA
gcaggagctggatttgatgc

SEQ ID NO: 281171 - DNA, 20 bp, synthetic construct
  source 1..20: mol_type = other DNA
tgcaggagctggatttgatg

SEQ ID NO: 281172 - DNA, 20 bp, synthetic construct
  source 1..20: mol_type = other DNA
ctgcaggagctggatttgat

SEQ ID NO: 281173 - DNA, 20 bp, synthetic construct
  source 1..20: mol_type = other DNA
cctgcaggagctggatttga

SEQ ID NO: 281174 - DNA, 20 bp, synthetic construct
  source 1..20: mol_type = other DNA
tcctgcaggagctggatttg

SEQ ID NO: 281175 - DNA, 20 bp, synthetic construct
  source 1..20: mol_type = other DNA
gtcctgcaggagctggattt

SEQ ID NO: 281176 - DNA, 20 bp, synthetic construct
  source 1..20: mol_type = other DNA
agtcctgcaggagctggatt

SEQ ID NO: 281177 - DNA, 20 bp, synthetic construct
  source 1..20: mol_type = other DNA
cagtcctgcaggagctggat

SEQ ID NO: 281178 - DNA, 20 bp, synthetic construct
  source 1..20: mol_type = other DNA
acagtcctgcaggagctgga

SEQ ID NO: 281179 - DNA, 20 bp, synthetic construct
  source 1..20: mol_type = other DNA
aacagtcctgcaggagctgg

SEQ ID NO: 281180 - DNA, 20 bp, synthetic construct
  source 1..20: mol_type = other DNA
aaacagtcctgcaggagctg

SEQ ID NO: 281181 - DNA, 20 bp, synthetic construct
  source 1..20: mol_type = other DNA
caaacagtcctgcaggagct

SEQ ID NO: 281182 - DNA, 20 bp, synthetic construct
  source 1..20: mol_type = other DNA
acaaacagtcctgcaggagc

SEQ ID NO: 281183 - DNA, 20 bp, synthetic construct
  source 1..20: mol_type = other DNA
tacaaacagtcctgcaggag

SEQ ID NO: 281184 - DNA, 20 bp, synthetic construct
  source 1..20: mol_type = other DNA
atacaaacagtcctgcagga

SEQ ID NO: 281185 - DNA, 20 bp, synthetic construct
  source 1..20: mol_type = other DNA
aatacaaacagtcctgcagg

SEQ ID NO: 281186 - DNA, 20 bp, synthetic construct
  source 1..20: mol_type = other DNA
taatacaaacagtcctgcag

SEQ ID NO: 281187 - DNA, 20 bp, synthetic construct
  source 1..20: mol_type = other DNA
ataatacaaacagtcctgca

SEQ ID NO: 281188 - DNA, 20 bp, synthetic construct
  source 1..20: mol_type = other DNA
aataatacaaacagtcctgc

SEQ ID NO: 281189 - DNA, 20 bp, synthetic construct
  source 1..20: mol_type = other DNA
caataatacaaacagtcctg

SEQ ID NO: 281190 - DNA, 20 bp, synthetic construct
  source 1..20: mol_type = other DNA
tcaataatacaaacagtcct

SEQ ID NO: 281191 - DNA, 20 bp, synthetic construct
  source 1..20: mol_type = other DNA
ttcaataatacaaacagtcc

SEQ ID NO: 281192 - DNA, 20 bp, synthetic construct
  source 1..20: mol_type = other DNA
cttcaataatacaaacagtc

SEQ ID NO: 281193 - DNA, 20 bp, synthetic construct
  source 1..20: mol_type = other DNA
acttcaataatacaaacagt

SEQ ID NO: 281194 - DNA, 20 bp, synthetic construct
  source 1..20: mol_type = other DNA
tacttcaataatacaaacag

SEQ ID NO: 281195 - DNA, 20 bp, synthetic construct
  source 1..20: mol_type = other DNA
gtacttcaataatacaaaca

SEQ ID NO: 281196 - DNA, 20 bp, synthetic construct
  source 1..20: mol_type = other DNA
tgtacttcaataatacaaac

SEQ ID NO: 281197 - DNA, 20 bp, synthetic construct
  source 1..20: mol_type = other DNA
ttgtacttcaataatacaaa

SEQ ID NO: 281198 - DNA, 20 bp, synthetic construct
  source 1..20: mol_type = other DNA
tttgtacttcaataatacaa

SEQ ID NO: 281199 - DNA, 20 bp, synthetic construct
  source 1..20: mol_type = other DNA
ctttgtacttcaataataca

SEQ ID NO: 281200 - DNA, 20 bp, synthetic construct
  source 1..20: mol_type = other DNA
actttgtacttcaataatac

SEQ ID NO: 281201 - DNA, 20 bp, synthetic construct
  source 1..20: mol_type = other DNA
cactttgtacttcaataata

SEQ ID NO: 281202 - DNA, 20 bp, synthetic construct
  source 1..20: mol_type = other DNA
ccactttgtacttcaataat

SEQ ID NO: 281203 - DNA, 20 bp, synthetic construct
  source 1..20: mol_type = other DNA
tccactttgtacttcaataa

SEQ ID NO: 281204 - DNA, 20 bp, synthetic construct
  source 1..20: mol_type = other DNA
ttccactttgtacttcaata

SEQ ID NO: 281205 - DNA, 20 bp, synthetic construct
  source 1..20: mol_type = other DNA
attccactttgtacttcaat

SEQ ID NO: 281206 - DNA, 20 bp, synthetic construct
  source 1..20: mol_type = other DNA
gattccactttgtacttcaa

SEQ ID NO: 281207 - DNA, 20 bp, synthetic construct
  source 1..20: mol_type = other DNA
tgattccactttgtacttca

SEQ ID NO: 281208 - DNA, 20 bp, synthetic construct
  source 1..20: mol_type = other DNA
ttgattccactttgtacttc

SEQ ID NO: 281209 - DNA, 20 bp, synthetic construct
  source 1..20: mol_type = other DNA
attgattccactttgtactt

SEQ ID NO: 281210 - DNA, 20 bp, synthetic construct
  source 1..20: mol_type = other DNA
tattgattccactttgtact

SEQ ID NO: 281211 - DNA, 20 bp, synthetic construct
  source 1..20: mol_type = other DNA
gtattgattccactttgtac

SEQ ID NO: 281212 - DNA, 20 bp, synthetic construct
  source 1..20: mol_type = other DNA
tgtattgattccactttgta

SEQ ID NO: 281213 - DNA, 20 bp, synthetic construct
  source 1..20: mol_type = other DNA
ttgtattgattccactttgt

SEQ ID NO: 281214 - DNA, 20 bp, synthetic construct
  source 1..20: mol_type = other DNA
tttgtattgattccactttg

SEQ ID NO: 281215 - DNA, 20 bp, synthetic construct
  source 1..20: mol_type = other DNA
atttgtattgattccacttt

SEQ ID NO: 281216 - DNA, 20 bp, synthetic construct
  source 1..20: mol_type = other DNA
catttgtattgattccactt

SEQ ID NO: 281217 - DNA, 20 bp, synthetic construct
  source 1..20: mol_type = other DNA
acatttgtattgattccact

SEQ ID NO: 281218 - DNA, 20 bp, synthetic construct
  source 1..20: mol_type = other DNA
aacatttgtattgattccac

SEQ ID NO: 281219 - DNA, 20 bp, synthetic construct
  source 1..20: mol_type = other DNA
caacatttgtattgattcca

SEQ ID NO: 281220 - DNA, 20 bp, synthetic construct
  source 1..20: mol_type = other DNA
ccaacatttgtattgattcc

SEQ ID NO: 281221 - DNA, 20 bp, synthetic construct
  source 1..20: mol_type = other DNA
tccaacatttgtattgattc

SEQ ID NO: 281222 - DNA, 20 bp, synthetic construct
  source 1..20: mol_type = other DNA
atccaacatttgtattgatt

SEQ ID NO: 281223 - DNA, 20 bp, synthetic construct
  source 1..20: mol_type = other DNA
tatccaacatttgtattgat

SEQ ID NO: 281224 - DNA, 20 bp, synthetic construct
  source 1..20: mol_type = other DNA
ctatccaacatttgtattga

SEQ ID NO: 281225 - DNA, 20 bp, synthetic construct
  source 1..20: mol_type = other DNA
gctatccaacatttgtattg

SEQ ID NO: 281226 - DNA, 20 bp, synthetic construct
  source 1..20: mol_type = other DNA
tgctatccaacatttgtatt

SEQ ID NO: 281227 - DNA, 20 bp, synthetic construct
  source 1..20: mol_type = other DNA
ctgctatccaacatttgtat

SEQ ID NO: 281228 - DNA, 20 bp, synthetic construct
  source 1..20: mol_type = other DNA
cctgctatccaacatttgta

SEQ ID NO: 281229 - DNA, 20 bp, synthetic construct
  source 1..20: mol_type = other DNA
ccctgctatccaacatttgt

SEQ ID NO: 281230 - DNA, 20 bp, synthetic construct
  source 1..20: mol_type = other DNA
cccctgctatccaacatttg

SEQ ID NO: 281231 - DNA, 20 bp, synthetic construct
  source 1..20: mol_type = other DNA
tcccctgctatccaacattt

SEQ ID NO: 281232 - DNA, 20 bp, synthetic construct
  source 1..20: mol_type = other DNA
ttcccctgctatccaacatt

SEQ ID NO: 281233 - DNA, 20 bp, synthetic construct
  source 1..20: mol_type = other DNA
gttcccctgctatccaacat

SEQ ID NO: 281234 - DNA, 20 bp, synthetic construct
  source 1..20: mol_type = other DNA
tgttcccctgctatccaaca

SEQ ID NO: 281235 - DNA, 20 bp, synthetic construct
  source 1..20: mol_type = other DNA
ttgttcccctgctatccaac

SEQ ID NO: 281236 - DNA, 20 bp, synthetic construct
  source 1..20: mol_type = other DNA
attgttcccctgctatccaa

SEQ ID NO: 281237 - DNA, 20 bp, synthetic construct
  source 1..20: mol_type = other DNA
tattgttcccctgctatcca

SEQ ID NO: 281238 - DNA, 20 bp, synthetic construct
  source 1..20: mol_type = other DNA
atattgttcccctgctatcc

SEQ ID NO: 281239 - DNA, 20 bp, synthetic construct
  source 1..20: mol_type = other DNA
aatattgttcccctgctatc

SEQ ID NO: 281240 - DNA, 20 bp, synthetic construct
  source 1..20: mol_type = other DNA
gaatattgttcccctgctat

SEQ ID NO: 281241 - DNA, 20 bp, synthetic construct
  source 1..20: mol_type = other DNA
tgaatattgttcccctgcta

SEQ ID NO: 281242 - DNA, 20 bp, synthetic construct
  source 1..20: mol_type = other DNA
gtgaatattgttcccctgct

SEQ ID NO: 281243 - DNA, 20 bp, synthetic construct
  source 1..20: mol_type = other DNA
tgtgaatattgttcccctgc

SEQ ID NO: 281244 - DNA, 20 bp, synthetic construct
  source 1..20: mol_type = other DNA
ttgtgaatattgttcccctg

SEQ ID NO: 281245 - DNA, 20 bp, synthetic construct
  source 1..20: mol_type = other DNA
tttgtgaatattgttcccct

SEQ ID NO: 281246 - DNA, 20 bp, synthetic construct
  source 1..20: mol_type = other DNA
ttttgtgaatattgttcccc

SEQ ID NO: 281247 - DNA, 20 bp, synthetic construct
  source 1..20: mol_type = other DNA
attttgtgaatattgttccc

SEQ ID NO: 281248 - DNA, 20 bp, synthetic construct
  source 1..20: mol_type = other DNA
cattttgtgaatattgttcc

SEQ ID NO: 281249 - DNA, 20 bp, synthetic construct
  source 1..20: mol_type = other DNA
ccattttgtgaatattgttc

SEQ ID NO: 281250 - DNA, 20 bp, synthetic construct
  source 1..20: mol_type = other DNA
tccattttgtgaatattgtt

SEQ ID NO: 281251 - DNA, 20 bp, synthetic construct
  source 1..20: mol_type = other DNA
ttccattttgtgaatattgt

SEQ ID NO: 281252 - DNA, 20 bp, synthetic construct
  source 1..20: mol_type = other DNA
attccattttgtgaatattg

SEQ ID NO: 281253 - DNA, 20 bp, synthetic construct
  source 1..20: mol_type = other DNA
cattccattttgtgaatatt

SEQ ID NO: 281254 - DNA, 20 bp, synthetic construct
  source 1..20: mol_type = other DNA
ccattccattttgtgaatat

SEQ ID NO: 281255 - DNA, 20 bp, synthetic construct
  source 1..20: mol_type = other DNA
cccattccattttgtgaata

SEQ ID NO: 281256 - DNA, 20 bp, synthetic construct
  source 1..20: mol_type = other DNA
tcccattccattttgtgaat

SEQ ID NO: 281257 - DNA, 20 bp, synthetic construct
  source 1..20: mol_type = other DNA
gtcccattccattttgtgaa

SEQ ID NO: 281258 - DNA, 20 bp, synthetic construct
  source 1..20: mol_type = other DNA
tgtcccattccattttgtga

SEQ ID NO: 281259 - DNA, 20 bp, synthetic construct
  source 1..20: mol_type = other DNA
atgtcccattccattttgtg

SEQ ID NO: 281260 - DNA, 20 bp, synthetic construct
  source 1..20: mol_type = other DNA
tatgtcccattccattttgt

SEQ ID NO: 281261 - DNA, 20 bp, synthetic construct
  source 1..20: mol_type = other DNA
ctatgtcccattccattttg

SEQ ID NO: 281262 - DNA, 20 bp, synthetic construct
  source 1..20: mol_type = other DNA
actatgtcccattccatttt

SEQ ID NO: 281263 - DNA, 20 bp, synthetic construct
  source 1..20: mol_type = other DNA
tactatgtcccattccattt

SEQ ID NO: 281264 - DNA, 20 bp, synthetic construct
  source 1..20: mol_type = other DNA
atactatgtcccattccatt

SEQ ID NO: 281265 - DNA, 20 bp, synthetic construct
  source 1..20: mol_type = other DNA
aatactatgtcccattccat

SEQ ID NO: 281266 - DNA, 20 bp, synthetic construct
  source 1..20: mol_type = other DNA
taatactatgtcccattcca

SEQ ID NO: 281267 - DNA, 20 bp, synthetic construct
  source 1..20: mol_type = other DNA
ttaatactatgtcccattcc

SEQ ID NO: 281268 - DNA, 20 bp, synthetic construct
  source 1..20: mol_type = other DNA
tttaatactatgtcccattc

SEQ ID NO: 281269 - DNA, 20 bp, synthetic construct
  source 1..20: mol_type = other DNA
gtttaatactatgtcccatt

SEQ ID NO: 281270 - DNA, 20 bp, synthetic construct
  source 1..20: mol_type = other DNA
tgtttaatactatgtcccat

SEQ ID NO: 281271 - DNA, 20 bp, synthetic construct
  source 1..20: mol_type = other DNA
atgtttaatactatgtccca

SEQ ID NO: 281272 - DNA, 20 bp, synthetic construct
  source 1..20: mol_type = other DNA
tatgtttaatactatgtccc

SEQ ID NO: 281273 - DNA, 20 bp, synthetic construct
  source 1..20: mol_type = other DNA
ctatgtttaatactatgtcc

SEQ ID NO: 281274 - DNA, 20 bp, synthetic construct
  source 1..20: mol_type = other DNA
actatgtttaatactatgtc

SEQ ID NO: 281275 - DNA, 20 bp, synthetic construct
  source 1..20: mol_type = other DNA
cactatgtttaatactatgt

SEQ ID NO: 281276 - DNA, 20 bp, synthetic construct
  source 1..20: mol_type = other DNA
gcactatgtttaatactatg

SEQ ID NO: 281277 - DNA, 20 bp, synthetic construct
  source 1..20: mol_type = other DNA
agcactatgtttaatactat

SEQ ID NO: 281278 - DNA, 20 bp, synthetic construct
  source 1..20: mol_type = other DNA
aagcactatgtttaatacta

SEQ ID NO: 281279 - DNA, 20 bp, synthetic construct
  source 1..20: mol_type = other DNA
gaagcactatgtttaatact

SEQ ID NO: 281280 - DNA, 20 bp, synthetic construct
  source 1..20: mol_type = other DNA
agaagcactatgtttaatac

SEQ ID NO: 281281 - DNA, 20 bp, synthetic construct
  source 1..20: mol_type = other DNA
cagaagcactatgtttaata

SEQ ID NO: 281282 - DNA, 20 bp, synthetic construct
  source 1..20: mol_type = other DNA
tcagaagcactatgtttaat

SEQ ID NO: 281283 - DNA, 20 bp, synthetic construct
  source 1..20: mol_type = other DNA
atcagaagcactatgtttaa

SEQ ID NO: 281284 - DNA, 20 bp, synthetic construct
  source 1..20: mol_type = other DNA
catcagaagcactatgttta

SEQ ID NO: 281285 - DNA, 20 bp, synthetic construct
  source 1..20: mol_type = other DNA
tcatcagaagcactatgttt

SEQ ID NO: 281286 - DNA, 20 bp, synthetic construct
  source 1..20: mol_type = other DNA
gtcatcagaagcactatgtt

SEQ ID NO: 281287 - DNA, 20 bp, synthetic construct
  source 1..20: mol_type = other DNA
ggtcatcagaagcactatgt

SEQ ID NO: 281288 - DNA, 20 bp, synthetic construct
  source 1..20: mol_type = other DNA
cggtcatcagaagcactatg

SEQ ID NO: 281289 - DNA, 20 bp, synthetic construct
  source 1..20: mol_type = other DNA
acggtcatcagaagcactat

SEQ ID NO: 281290 - DNA, 20 bp, synthetic construct
  source 1..20: mol_type = other DNA
tacggtcatcagaagcacta

SEQ ID NO: 281291 - DNA, 20 bp, synthetic construct
  source 1..20: mol_type = other DNA
ctacggtcatcagaagcact

SEQ ID NO: 281292 - DNA, 20 bp, synthetic construct
  source 1..20: mol_type = other DNA
tctacggtcatcagaagcac

SEQ ID NO: 281293 - DNA, 20 bp, synthetic construct
  source 1..20: mol_type = other DNA
gtctacggtcatcagaagca

SEQ ID NO: 281294 - DNA, 20 bp, synthetic construct
  source 1..20: mol_type = other DNA
ggtctacggtcatcagaagc

SEQ ID NO: 281295 - DNA, 20 bp, synthetic construct
  source 1..20: mol_type = other DNA
tggtctacggtcatcagaag

SEQ ID NO: 281296 - DNA, 20 bp, synthetic construct
  source 1..20: mol_type = other DNA
atggtctacggtcatcagaa

SEQ ID NO: 281297 - DNA, 20 bp, synthetic construct
  source 1..20: mol_type = other DNA
tatggtctacggtcatcaga

SEQ ID NO: 281298 - DNA, 20 bp, synthetic construct
  source 1..20: mol_type = other DNA
ctatggtctacggtcatcag

SEQ ID NO: 281299 - DNA, 20 bp, synthetic construct
  source 1..20: mol_type = other DNA
tctatggtctacggtcatca

SEQ ID NO: 281300 - DNA, 20 bp, synthetic construct
  source 1..20: mol_type = other DNA
gtctatggtctacggtcatc

SEQ ID NO: 281301 - DNA, 20 bp, synthetic construct
  source 1..20: mol_type = other DNA
tgtctatggtctacggtcat

SEQ ID NO: 281302 - DNA, 20 bp, synthetic construct
  source 1..20: mol_type = other DNA
ttgtctatggtctacggtca

SEQ ID NO: 281303 - DNA, 20 bp, synthetic construct
  source 1..20: mol_type = other DNA
attgtctatggtctacggtc

SEQ ID NO: 281304 - DNA, 20 bp, synthetic construct
  source 1..20: mol_type = other DNA
cattgtctatggtctacggt

SEQ ID NO: 281305 - DNA, 20 bp, synthetic construct
  source 1..20: mol_type = other DNA
gcattgtctatggtctacgg

SEQ ID NO: 281306 - DNA, 20 bp, synthetic construct
  source 1..20: mol_type = other DNA
agcattgtctatggtctacg

SEQ ID NO: 281307 - DNA, 20 bp, synthetic construct
  source 1..20: mol_type = other DNA
aagcattgtctatggtctac

SEQ ID NO: 281308 - DNA, 20 bp, synthetic construct
  source 1..20: mol_type = other DNA
taagcattgtctatggtcta

SEQ ID NO: 281309 - DNA, 20 bp, synthetic construct
  source 1..20: mol_type = other DNA
ctaagcattgtctatggtct

SEQ ID NO: 281310 - DNA, 20 bp, synthetic construct
  source 1..20: mol_type = other DNA
cctaagcattgtctatggtc

SEQ ID NO: 281311 - DNA, 20 bp, synthetic construct
  source 1..20: mol_type = other DNA
tcctaagcattgtctatggt

SEQ ID NO: 281312 - DNA, 20 bp, synthetic construct
  source 1..20: mol_type = other DNA
atcctaagcattgtctatgg

SEQ ID NO: 281313 - DNA, 20 bp, synthetic construct
  source 1..20: mol_type = other DNA
tatcctaagcattgtctatg

SEQ ID NO: 281314 - DNA, 20 bp, synthetic construct
  source 1..20: mol_type = other DNA
atatcctaagcattgtctat

SEQ ID NO: 281315 - DNA, 20 bp, synthetic construct
  source 1..20: mol_type = other DNA
catatcctaagcattgtcta

SEQ ID NO: 281316 - DNA, 20 bp, synthetic construct
  source 1..20: mol_type = other DNA
tcatatcctaagcattgtct

SEQ ID NO: 281317 - DNA, 20 bp, synthetic construct
  source 1..20: mol_type = other DNA
atcatatcctaagcattgtc

SEQ ID NO: 281318 - DNA, 20 bp, synthetic construct
  source 1..20: mol_type = other DNA
tatcatatcctaagcattgt

SEQ ID NO: 281319 - DNA, 20 bp, synthetic construct
  source 1..20: mol_type = other DNA
atatcatatcctaagcattg

SEQ ID NO: 281320 - DNA, 20 bp, synthetic construct
  source 1..20: mol_type = other DNA
gatatcatatcctaagcatt

SEQ ID NO: 281321 - DNA, 20 bp, synthetic construct
  source 1..20: mol_type = other DNA
tgatatcatatcctaagcat

SEQ ID NO: 281322 - DNA, 20 bp, synthetic construct
  source 1..20: mol_type = other DNA
gtgatatcatatcctaagca

SEQ ID NO: 281323 - DNA, 20 bp, synthetic construct
  source 1..20: mol_type = other DNA
agtgatatcatatcctaagc

SEQ ID NO: 281324 - DNA, 20 bp, synthetic construct
  source 1..20: mol_type = other DNA
aagtgatatcatatcctaag

SEQ ID NO: 281325 - DNA, 20 bp, synthetic construct
  source 1..20: mol_type = other DNA
gaagtgatatcatatcctaa

SEQ ID NO: 281326 - DNA, 20 bp, synthetic construct
  source 1..20: mol_type = other DNA
agaagtgatatcatatccta

SEQ ID NO: 281327 - DNA, 20 bp, synthetic construct
  source 1..20: mol_type = other DNA
aagaagtgatatcatatcct

SEQ ID NO: 281328 - DNA, 20 bp, synthetic construct
  source 1..20: mol_type = other DNA
aaagaagtgatatcatatcc

SEQ ID NO: 281329 - DNA, 20 bp, synthetic construct
  source 1..20: mol_type = other DNA
aaaagaagtgatatcatatc

SEQ ID NO: 281330 - DNA, 20 bp, synthetic construct
  source 1..20: mol_type = other DNA
caaaagaagtgatatcatat

SEQ ID NO: 281331 - DNA, 20 bp, synthetic construct
  source 1..20: mol_type = other DNA
acaaaagaagtgatatcata

SEQ ID NO: 281332 - DNA, 20 bp, synthetic construct
  source 1..20: mol_type = other DNA
aacaaaagaagtgatatcat

SEQ ID NO: 281333 - DNA, 20 bp, synthetic construct
  source 1..20: mol_type = other DNA
caacaaaagaagtgatatca

SEQ ID NO: 281334 - DNA, 20 bp, synthetic construct
  source 1..20: mol_type = other DNA
acaacaaaagaagtgatatc

SEQ ID NO: 281335 - DNA, 20 bp, synthetic construct
  source 1..20: mol_type = other DNA
aacaacaaaagaagtgatat

SEQ ID NO: 281336 - DNA, 20 bp, synthetic construct
  source 1..20: mol_type = other DNA
aaacaacaaaagaagtgata

SEQ ID NO: 281337 - DNA, 20 bp, synthetic construct
  source 1..20: mol_type = other DNA
aaaacaacaaaagaagtgat

SEQ ID NO: 281338 - DNA, 20 bp, synthetic construct
  source 1..20: mol_type = other DNA
aaaaacaacaaaagaagtga

SEQ ID NO: 281339 - DNA, 20 bp, synthetic construct
  source 1..20: mol_type = other DNA
aaaaaacaacaaaagaagtg

SEQ ID NO: 281340 - DNA, 20 bp, synthetic construct
  source 1..20: mol_type = other DNA
caaaaaacaacaaaagaagt

SEQ ID NO: 281341 - DNA, 20 bp, synthetic construct
  source 1..20: mol_type = other DNA
acaaaaaacaacaaaagaag

SEQ ID NO: 281342 - DNA, 20 bp, synthetic construct
  source 1..20: mol_type = other DNA
tacaaaaaacaacaaaagaa

SEQ ID NO: 281343 - DNA, 20 bp, synthetic construct
  source 1..20: mol_type = other DNA
atacaaaaaacaacaaaaga

SEQ ID NO: 281344 - DNA, 20 bp, synthetic construct
  source 1..20: mol_type = other DNA
aatacaaaaaacaacaaaag

SEQ ID NO: 281345 - DNA, 20 bp, synthetic construct
  source 1..20: mol_type = other DNA
aaatacaaaaaacaacaaaa

SEQ ID NO: 281346 - DNA, 20 bp, synthetic construct
  source 1..20: mol_type = other DNA
aaaatacaaaaaacaacaaa

SEQ ID NO: 281347 - DNA, 20 bp, synthetic construct
  source 1..20: mol_type = other DNA
caaaatacaaaaaacaacaa

SEQ ID NO: 281348 - DNA, 20 bp, synthetic construct
  source 1..20: mol_type = other DNA
tcaaaatacaaaaaacaaca

SEQ ID NO: 281349 - DNA, 20 bp, synthetic construct
  source 1..20: mol_type = other DNA
ctcaaaatacaaaaaacaac

SEQ ID NO: 281350 - DNA, 20 bp, synthetic construct
  source 1..20: mol_type = other DNA
tctcaaaatacaaaaaacaa

SEQ ID NO: 281351 - DNA, 20 bp, synthetic construct
  source 1..20: mol_type = other DNA
gtctcaaaatacaaaaaaca

SEQ ID NO: 281352 - DNA, 20 bp, synthetic construct
  source 1..20: mol_type = other DNA
cgtctcaaaatacaaaaaac

SEQ ID NO: 281353 - DNA, 20 bp, synthetic construct
  source 1..20: mol_type = other DNA
tcgtctcaaaatacaaaaaa

SEQ ID NO: 281354 - DNA, 20 bp, synthetic construct
  source 1..20: mol_type = other DNA
ttcgtctcaaaatacaaaaa

SEQ ID NO: 281355 - DNA, 20 bp, synthetic construct
  source 1..20: mol_type = other DNA
cttcgtctcaaaatacaaaa

SEQ ID NO: 281356 - DNA, 20 bp, synthetic construct
  source 1..20: mol_type = other DNA
acttcgtctcaaaatacaaa

SEQ ID NO: 281357 - DNA, 20 bp, synthetic construct
  source 1..20: mol_type = other DNA
gacttcgtctcaaaatacaa

SEQ ID NO: 281358 - DNA, 20 bp, synthetic construct
  source 1..20: mol_type = other DNA
agacttcgtctcaaaataca

SEQ ID NO: 281359 - DNA, 20 bp, synthetic construct
  source 1..20: mol_type = other DNA
gagacttcgtctcaaaatac

SEQ ID NO: 281360 - DNA, 20 bp, synthetic construct
  source 1..20: mol_type = other DNA
tgagacttcgtctcaaaata

SEQ ID NO: 281361 - DNA, 20 bp, synthetic construct
  source 1..20: mol_type = other DNA
atgagacttcgtctcaaaat

SEQ ID NO: 281362 - DNA, 20 bp, synthetic construct
  source 1..20: mol_type = other DNA
aatgagacttcgtctcaaaa

SEQ ID NO: 281363 - DNA, 20 bp, synthetic construct
  source 1..20: mol_type = other DNA
gaatgagacttcgtctcaaa

SEQ ID NO: 281364 - DNA, 20 bp, synthetic construct
  source 1..20: mol_type = other DNA
agaatgagacttcgtctcaa

SEQ ID NO: 281365 - DNA, 20 bp, synthetic construct
  source 1..20: mol_type = other DNA
cagaatgagacttcgtctca

SEQ ID NO: 281366 - DNA, 20 bp, synthetic construct
  source 1..20: mol_type = other DNA
acagaatgagacttcgtctc

SEQ ID NO: 281367 - DNA, 20 bp, synthetic construct
  source 1..20: mol_type = other DNA
gacagaatgagacttcgtct

SEQ ID NO: 281368 - DNA, 20 bp, synthetic construct
  source 1..20: mol_type = other DNA
tgacagaatgagacttcgtc

SEQ ID NO: 281369 - DNA, 20 bp, synthetic construct
  source 1..20: mol_type = other DNA
gtgacagaatgagacttcgt

SEQ ID NO: 281370 - DNA, 20 bp, synthetic construct
  source 1..20: mol_type = other DNA
ggtgacagaatgagacttcg

SEQ ID NO: 281371 - DNA, 20 bp, synthetic construct
  source 1..20: mol_type = other DNA
gggtgacagaatgagacttc

SEQ ID NO: 281372 - DNA, 20 bp, synthetic construct
  source 1..20: mol_type = other DNA
tgggtgacagaatgagactt

SEQ ID NO: 281373 - DNA, 20 bp, synthetic construct
  source 1..20: mol_type = other DNA
ctgggtgacagaatgagact

SEQ ID NO: 281374 - DNA, 20 bp, synthetic construct
  source 1..20: mol_type = other DNA
cctgggtgacagaatgagac

SEQ ID NO: 281375 - DNA, 20 bp, synthetic construct
  source 1..20: mol_type = other DNA
gcctgggtgacagaatgaga

SEQ ID NO: 281376 - DNA, 20 bp, synthetic construct
  source 1..20: mol_type = other DNA
agcctgggtgacagaatgag

SEQ ID NO: 281377 - DNA, 20 bp, synthetic construct
  source 1..20: mol_type = other DNA
cagcctgggtgacagaatga

SEQ ID NO: 281378 - DNA, 20 bp, synthetic construct
  source 1..20: mol_type = other DNA
ccagcctgggtgacagaatg

SEQ ID NO: 281379 - DNA, 20 bp, synthetic construct
  source 1..20: mol_type = other DNA
tccagcctgggtgacagaat

SEQ ID NO: 281380 - DNA, 20 bp, synthetic construct
  source 1..20: mol_type = other DNA
ctccagcctgggtgacagaa

SEQ ID NO: 281381 - DNA, 20 bp, synthetic construct
  source 1..20: mol_type = other DNA
actccagcctgggtgacaga

SEQ ID NO: 281382 - DNA, 20 bp, synthetic construct
  source 1..20: mol_type = other DNA
aactccagcctgggtgacag

SEQ ID NO: 281383 - DNA, 20 bp, synthetic construct
  source 1..20: mol_type = other DNA
gaactccagcctgggtgaca

SEQ ID NO: 281384 - DNA, 20 bp, synthetic construct
  source 1..20: mol_type = other DNA
tgaactccagcctgggtgac

SEQ ID NO: 281385 - DNA, 20 bp, synthetic construct
  source 1..20: mol_type = other DNA
ctgaactccagcctgggtga

SEQ ID NO: 281386 - DNA, 20 bp, synthetic construct
  source 1..20: mol_type = other DNA
actgaactccagcctgggtg

SEQ ID NO: 281387 - DNA, 20 bp, synthetic construct
  source 1..20: mol_type = other DNA
cactgaactccagcctgggt

SEQ ID NO: 281388 - DNA, 20 bp, synthetic construct
  source 1..20: mol_type = other DNA
ccactgaactccagcctggg

SEQ ID NO: 281389 - DNA, 20 bp, synthetic construct
  source 1..20: mol_type = other DNA
gccactgaactccagcctgg

SEQ ID NO: 281390 - DNA, 20 bp, synthetic construct
  source 1..20: mol_type = other DNA
cgccactgaactccagcctg

SEQ ID NO: 281391 - DNA, 20 bp, synthetic construct
  source 1..20: mol_type = other DNA
gcgccactgaactccagcct

SEQ ID NO: 281392 - DNA, 20 bp, synthetic construct
  source 1..20: mol_type = other DNA
ggcgccactgaactccagcc

SEQ ID NO: 281393 - DNA, 20 bp, synthetic construct
  source 1..20: mol_type = other DNA
tggcgccactgaactccagc

SEQ ID NO: 281394 - DNA, 20 bp, synthetic construct
  source 1..20: mol_type = other DNA
atggcgccactgaactccag

SEQ ID NO: 281395 - DNA, 20 bp, synthetic construct
  source 1..20: mol_type = other DNA
gatggcgccactgaactcca

SEQ ID NO: 281396 - DNA, 20 bp, synthetic construct
  source 1..20: mol_type = other DNA
agatggcgccactgaactcc

SEQ ID NO: 281397 - DNA, 20 bp, synthetic construct
  source 1..20: mol_type = other DNA
gagatggcgccactgaactc

SEQ ID NO: 281398 - DNA, 20 bp, synthetic construct
  source 1..20: mol_type = other DNA
tgagatggcgccactgaact

SEQ ID NO: 281399 - DNA, 20 bp, synthetic construct
  source 1..20: mol_type = other DNA
ctgagatggcgccactgaac

SEQ ID NO: 281400 - DNA, 20 bp, synthetic construct
  source 1..20: mol_type = other DNA
gctgagatggcgccactgaa

SEQ ID NO: 281401 - DNA, 20 bp, synthetic construct
  source 1..20: mol_type = other DNA
agctgagatggcgccactga

SEQ ID NO: 281402 - DNA, 20 bp, synthetic construct
  source 1..20: mol_type = other DNA
gagctgagatggcgccactg

SEQ ID NO: 281403 - DNA, 20 bp, synthetic construct
  source 1..20: mol_type = other DNA
tgagctgagatggcgccact

SEQ ID NO: 281404 - DNA, 20 bp, synthetic construct
  source 1..20: mol_type = other DNA
gtgagctgagatggcgccac

SEQ ID NO: 281405 - DNA, 20 bp, synthetic construct
  source 1..20: mol_type = other DNA
agtgagctgagatggcgcca

SEQ ID NO: 281406 - DNA, 20 bp, synthetic construct
  source 1..20: mol_type = other DNA
cagtgagctgagatggcgcc

SEQ ID NO: 281407 - DNA, 20 bp, synthetic construct
  source 1..20: mol_type = other DNA
gcagtgagctgagatggcgc

SEQ ID NO: 281408 - DNA, 20 bp, synthetic construct
  source 1..20: mol_type = other DNA
tgcagtgagctgagatggcg

SEQ ID NO: 281409 - DNA, 20 bp, synthetic construct
  source 1..20: mol_type = other DNA
ttgcagtgagctgagatggc

SEQ ID NO: 281410 - DNA, 20 bp, synthetic construct
  source 1..20: mol_type = other DNA
gttgcagtgagctgagatgg

SEQ ID NO: 281411 - DNA, 20 bp, synthetic construct
  source 1..20: mol_type = other DNA
ggttgcagtgagctgagatg

SEQ ID NO: 281412 - DNA, 20 bp, synthetic construct
  source 1..20: mol_type = other DNA
aggttgcagtgagctgagat

SEQ ID NO: 281413 - DNA, 20 bp, synthetic construct
  source 1..20: mol_type = other DNA
gaggttgcagtgagctgaga

SEQ ID NO: 281414 - DNA, 20 bp, synthetic construct
  source 1..20: mol_type = other DNA
ggaggttgcagtgagctgag

SEQ ID NO: 281415 - DNA, 20 bp, synthetic construct
  source 1..20: mol_type = other DNA
tggaggttgcagtgagctga

SEQ ID NO: 281416 - DNA, 20 bp, synthetic construct
  source 1..20: mol_type = other DNA
atggaggttgcagtgagctg

SEQ ID NO: 281417 - DNA, 20 bp, synthetic construct
  source 1..20: mol_type = other DNA
gatggaggttgcagtgagct

SEQ ID NO: 281418 - DNA, 20 bp, synthetic construct
  source 1..20: mol_type = other DNA
agatggaggttgcagtgagc

SEQ ID NO: 281419 - DNA, 20 bp, synthetic construct
  source 1..20: mol_type = other DNA
gagatggaggttgcagtgag

SEQ ID NO: 281420 - DNA, 20 bp, synthetic construct
  source 1..20: mol_type = other DNA
ggagatggaggttgcagtga

SEQ ID NO: 281421 - DNA, 20 bp, synthetic construct
  source 1..20: mol_type = other DNA
gggagatggaggttgcagtg

SEQ ID NO: 281422 - DNA, 20 bp, synthetic construct
  source 1..20: mol_type = other DNA
cgggagatggaggttgcagt

SEQ ID NO: 281423 - DNA, 20 bp, synthetic construct
  source 1..20: mol_type = other DNA
ccgggagatggaggttgcag

SEQ ID NO: 281424 - DNA, 20 bp, synthetic construct
  source 1..20: mol_type = other DNA
cccgggagatggaggttgca

SEQ ID NO: 281425 - DNA, 20 bp, synthetic construct
  source 1..20: mol_type = other DNA
acccgggagatggaggttgc

SEQ ID NO: 281426 - DNA, 20 bp, synthetic construct
  source 1..20: mol_type = other DNA
aacccgggagatggaggttg

SEQ ID NO: 281427 - DNA, 20 bp, synthetic construct
  source 1..20: mol_type = other DNA
gaacccgggagatggaggtt

SEQ ID NO: 281428 - DNA, 20 bp, synthetic construct
  source 1..20: mol_type = other DNA
tgaacccgggagatggaggt

SEQ ID NO: 281429 - DNA, 20 bp, synthetic construct
  source 1..20: mol_type = other DNA
ttgaacccgggagatggagg

SEQ ID NO: 281430 - DNA, 20 bp, synthetic construct
  source 1..20: mol_type = other DNA
cttgaacccgggagatggag

SEQ ID NO: 281431 - DNA, 20 bp, synthetic construct
  source 1..20: mol_type = other DNA
gcttgaacccgggagatgga

SEQ ID NO: 281432 - DNA, 20 bp, synthetic construct
  source 1..20: mol_type = other DNA
agcttgaacccgggagatgg

SEQ ID NO: 281433 - DNA, 20 bp, synthetic construct
  source 1..20: mol_type = other DNA
tagcttgaacccgggagatg

SEQ ID NO: 281434 - DNA, 20 bp, synthetic construct
  source 1..20: mol_type = other DNA
atagcttgaacccgggagat

SEQ ID NO: 281435 - DNA, 20 bp, synthetic construct
  source 1..20: mol_type = other DNA
aatagcttgaacccgggaga

SEQ ID NO: 281436 - DNA, 20 bp, synthetic construct
  source 1..20: mol_type = other DNA
gaatagcttgaacccgggag

SEQ ID NO: 281437 - DNA, 20 bp, synthetic construct
  source 1..20: mol_type = other DNA
agaatagcttgaacccggga

SEQ ID NO: 281438 - DNA, 20 bp, synthetic construct
  source 1..20: mol_type = other DNA
gagaatagcttgaacccggg

SEQ ID NO: 281439 - DNA, 20 bp, synthetic construct
  source 1..20: mol_type = other DNA
ggagaatagcttgaacccgg

SEQ ID NO: 281440 - DNA, 20 bp, synthetic construct
  source 1..20: mol_type = other DNA
aggagaatagcttgaacccg

SEQ ID NO: 281441 - DNA, 20 bp, synthetic construct
  source 1..20: mol_type = other DNA
aaggagaatagcttgaaccc

SEQ ID NO: 281442 - DNA, 20 bp, synthetic construct
  source 1..20: mol_type = other DNA
gaaggagaatagcttgaacc

SEQ ID NO: 281443 - DNA, 20 bp, synthetic construct
  source 1..20: mol_type = other DNA
ggaaggagaatagcttgaac

SEQ ID NO: 281444 - DNA, 20 bp, synthetic construct
  source 1..20: mol_type = other DNA
aggaaggagaatagcttgaa

SEQ ID NO: 281445 - DNA, 20 bp, synthetic construct
  source 1..20: mol_type = other DNA
gaggaaggagaatagcttga

SEQ ID NO: 281446 - DNA, 20 bp, synthetic construct
  source 1..20: mol_type = other DNA
tgaggaaggagaatagcttg

SEQ ID NO: 281447 - DNA, 20 bp, synthetic construct
  source 1..20: mol_type = other DNA
ttgaggaaggagaatagctt

SEQ ID NO: 281448 - DNA, 20 bp, synthetic construct
  source 1..20: mol_type = other DNA
gttgaggaaggagaatagct

SEQ ID NO: 281449 - DNA, 20 bp, synthetic construct
  source 1..20: mol_type = other DNA
ggttgaggaaggagaatagc

SEQ ID NO: 281450 - DNA, 20 bp, synthetic construct
  source 1..20: mol_type = other DNA
aggttgaggaaggagaatag

SEQ ID NO: 281451 - DNA, 20 bp, synthetic construct
  source 1..20: mol_type = other DNA
gaggttgaggaaggagaata

SEQ ID NO: 281452 - DNA, 20 bp, synthetic construct
  source 1..20: mol_type = other DNA
ggaggttgaggaaggagaat

SEQ ID NO: 281453 - DNA, 20 bp, synthetic construct
  source 1..20: mol_type = other DNA
gggaggttgaggaaggagaa

SEQ ID NO: 281454 - DNA, 20 bp, synthetic construct
  source 1..20: mol_type = other DNA
cgggaggttgaggaaggaga

SEQ ID NO: 281455 - DNA, 20 bp, synthetic construct
  source 1..20: mol_type = other DNA
tcgggaggttgaggaaggag

SEQ ID NO: 281456 - DNA, 20 bp, synthetic construct
  source 1..20: mol_type = other DNA
ctcgggaggttgaggaagga

SEQ ID NO: 281457 - DNA, 20 bp, synthetic construct
  source 1..20: mol_type = other DNA
actcgggaggttgaggaagg

SEQ ID NO: 281458 - DNA, 20 bp, synthetic construct
  source 1..20: mol_type = other DNA
tactcgggaggttgaggaag

SEQ ID NO: 281459 - DNA, 20 bp, synthetic construct
  source 1..20: mol_type = other DNA
ctactcgggaggttgaggaa

SEQ ID NO: 281460 - DNA, 20 bp, synthetic construct
  source 1..20: mol_type = other DNA
gctactcgggaggttgagga

SEQ ID NO: 281461 - DNA, 20 bp, synthetic construct
  source 1..20: mol_type = other DNA
agctactcgggaggttgagg

SEQ ID NO: 281462 - DNA, 20 bp, synthetic construct
  source 1..20: mol_type = other DNA
cagctactcgggaggttgag

SEQ ID NO: 281463 - DNA, 20 bp, synthetic construct
  source 1..20: mol_type = other DNA
ccagctactcgggaggttga

SEQ ID NO: 281464 - DNA, 20 bp, synthetic construct
  source 1..20: mol_type = other DNA
cccagctactcgggaggttg

SEQ ID NO: 281465 - DNA, 20 bp, synthetic construct
  source 1..20: mol_type = other DNA
acccagctactcgggaggtt

SEQ ID NO: 281466 - DNA, 20 bp, synthetic construct
  source 1..20: mol_type = other DNA
aacccagctactcgggaggt

SEQ ID NO: 281467 - DNA, 20 bp, synthetic construct
  source 1..20: mol_type = other DNA
caacccagctactcgggagg

SEQ ID NO: 281468 - DNA, 20 bp, synthetic construct
  source 1..20: mol_type = other DNA
gcaacccagctactcgggag

SEQ ID NO: 281469 - DNA, 20 bp, synthetic construct
  source 1..20: mol_type = other DNA
cgcaacccagctactcggga

SEQ ID NO: 281470 - DNA, 20 bp, synthetic construct
  source 1..20: mol_type = other DNA
gcgcaacccagctactcggg

SEQ ID NO: 281471 - DNA, 20 bp, synthetic construct
  source 1..20: mol_type = other DNA
tgcgcaacccagctactcgg

SEQ ID NO: 281472 - DNA, 20 bp, synthetic construct
  source 1..20: mol_type = other DNA
gtgcgcaacccagctactcg

SEQ ID NO: 281473 - DNA, 20 bp, synthetic construct
  source 1..20: mol_type = other DNA
ggtgcgcaacccagctactc

SEQ ID NO: 281474 - DNA, 20 bp, synthetic construct
  source 1..20: mol_type = other DNA
tggtgcgcaacccagctact

SEQ ID NO: 281475 - DNA, 20 bp, synthetic construct
  source 1..20: mol_type = other DNA
gtggtgcgcaacccagctac

SEQ ID NO: 281476 - DNA, 20 bp, synthetic construct
  source 1..20: mol_type = other DNA
ggtggtgcgcaacccagcta

SEQ ID NO: 281477 - DNA, 20 bp, synthetic construct
  source 1..20: mol_type = other DNA
tggtggtgcgcaacccagct

SEQ ID NO: 281478 - DNA, 20 bp, synthetic construct
  source 1..20: mol_type = other DNA
atggtggtgcgcaacccagc

SEQ ID NO: 281479 - DNA, 20 bp, synthetic construct
  source 1..20: mol_type = other DNA
catggtggtgcgcaacccag

SEQ ID NO: 281480 - DNA, 20 bp, synthetic construct
  source 1..20: mol_type = other DNA
gcatggtggtgcgcaaccca

SEQ ID NO: 281481 - DNA, 20 bp, synthetic construct
  source 1..20: mol_type = other DNA
ggcatggtggtgcgcaaccc

SEQ ID NO: 281482 - DNA, 20 bp, synthetic construct
  source 1..20: mol_type = other DNA
aggcatggtggtgcgcaacc

SEQ ID NO: 281483 - DNA, 20 bp, synthetic construct
  source 1..20: mol_type = other DNA
caggcatggtggtgcgcaac

SEQ ID NO: 281484 - DNA, 20 bp, synthetic construct
  source 1..20: mol_type = other DNA
ccaggcatggtggtgcgcaa

SEQ ID NO: 281485 - DNA, 20 bp, synthetic construct
  source 1..20: mol_type = other DNA
gccaggcatggtggtgcgca

SEQ ID NO: 281486 - DNA, 20 bp, synthetic construct
  source 1..20: mol_type = other DNA
agccaggcatggtggtgcgc

SEQ ID NO: 281487 - DNA, 20 bp, synthetic construct
  source 1..20: mol_type = other DNA
tagccaggcatggtggtgcg

SEQ ID NO: 281488 - DNA, 20 bp, synthetic construct
  source 1..20: mol_type = other DNA
ttagccaggcatggtggtgc

SEQ ID NO: 281489 - DNA, 20 bp, synthetic construct
  source 1..20: mol_type = other DNA
gttagccaggcatggtggtg

SEQ ID NO: 281490 - DNA, 20 bp, synthetic construct
  source 1..20: mol_type = other DNA
agttagccaggcatggtggt

SEQ ID NO: 281491 - DNA, 20 bp, synthetic construct
  source 1..20: mol_type = other DNA
aagttagccaggcatggtgg

SEQ ID NO: 281492 - DNA, 20 bp, synthetic construct
  source 1..20: mol_type = other DNA
aaagttagccaggcatggtg

SEQ ID NO: 281493 - DNA, 20 bp, synthetic construct
  source 1..20: mol_type = other DNA
aaaagttagccaggcatggt

SEQ ID NO: 281494 - DNA, 20 bp, synthetic construct
  source 1..20: mol_type = other DNA
caaaagttagccaggcatgg

SEQ ID NO: 281495 - DNA, 20 bp, synthetic construct
  source 1..20: mol_type = other DNA
acaaaagttagccaggcatg

SEQ ID NO: 281496 - DNA, 20 bp, synthetic construct
  source 1..20: mol_type = other DNA
tacaaaagttagccaggcat

SEQ ID NO: 281497 - DNA, 20 bp, synthetic construct
  source 1..20: mol_type = other DNA
atacaaaagttagccaggca

SEQ ID NO: 281498 - DNA, 20 bp, synthetic construct
  source 1..20: mol_type = other DNA
aatacaaaagttagccaggc

SEQ ID NO: 281499 - DNA, 20 bp, synthetic construct
  source 1..20: mol_type = other DNA
aaatacaaaagttagccagg

SEQ ID NO: 281500 - DNA, 20 bp, synthetic construct
  source 1..20: mol_type = other DNA
aaaatacaaaagttagccag

SEQ ID NO: 281501 - DNA, 20 bp, synthetic construct
  source 1..20: mol_type = other DNA
aaaaatacaaaagttagcca

SEQ ID NO: 281502 - DNA, 20 bp, synthetic construct
  source 1..20: mol_type = other DNA
taaaaatacaaaagttagcc

SEQ ID NO: 281503 - DNA, 20 bp, synthetic construct
  source 1..20: mol_type = other DNA
ctaaaaatacaaaagttagc

SEQ ID NO: 281504 - DNA, 20 bp, synthetic construct
  source 1..20: mol_type = other DNA
actaaaaatacaaaagttag

SEQ ID NO: 281505 - DNA, 20 bp, synthetic construct
  source 1..20: mol_type = other DNA
tactaaaaatacaaaagtta

SEQ ID NO: 281506 - DNA, 20 bp, synthetic construct
  source 1..20: mol_type = other DNA
gtactaaaaatacaaaagtt

SEQ ID NO: 281507 - DNA, 20 bp, synthetic construct
  source 1..20: mol_type = other DNA
tgtactaaaaatacaaaagt

SEQ ID NO: 281508 - DNA, 20 bp, synthetic construct
  source 1..20: mol_type = other DNA
ctgtactaaaaatacaaaag

SEQ ID NO: 281509 - DNA, 20 bp, synthetic construct
  source 1..20: mol_type = other DNA
tctgtactaaaaatacaaaa

SEQ ID NO: 281510 - DNA, 20 bp, synthetic construct
  source 1..20: mol_type = other DNA
gtctgtactaaaaatacaaa

SEQ ID NO: 281511 - DNA, 20 bp, synthetic construct
  source 1..20: mol_type = other DNA
cgtctgtactaaaaatacaa

SEQ ID NO: 281512 - DNA, 20 bp, synthetic construct
  source 1..20: mol_type = other DNA
ccgtctgtactaaaaataca

SEQ ID NO: 281513 - DNA, 20 bp, synthetic construct
  source 1..20: mol_type = other DNA
cccgtctgtactaaaaatac

SEQ ID NO: 281514 - DNA, 20 bp, synthetic construct
  source 1..20: mol_type = other DNA
ccccgtctgtactaaaaata

SEQ ID NO: 281515 - DNA, 20 bp, synthetic construct
  source 1..20: mol_type = other DNA
accccgtctgtactaaaaat

SEQ ID NO: 281516 - DNA, 20 bp, synthetic construct
  source 1..20: mol_type = other DNA
aaccccgtctgtactaaaaa

SEQ ID NO: 281517 - DNA, 20 bp, synthetic construct
  source 1..20: mol_type = other DNA
aaaccccgtctgtactaaaa

SEQ ID NO: 281518 - DNA, 20 bp, synthetic construct
  source 1..20: mol_type = other DNA
gaaaccccgtctgtactaaa

SEQ ID NO: 281519 - DNA, 20 bp, synthetic construct
  source 1..20: mol_type = other DNA
tgaaaccccgtctgtactaa

SEQ ID NO: 281520 - DNA, 20 bp, synthetic construct
  source 1..20: mol_type = other DNA
gtgaaaccccgtctgtacta

SEQ ID NO: 281521 - DNA, 20 bp, synthetic construct
  source 1..20: mol_type = other DNA
ggtgaaaccccgtctgtact

SEQ ID NO: 281522 - DNA, 20 bp, synthetic construct
  source 1..20: mol_type = other DNA
tggtgaaaccccgtctgtac

SEQ ID NO: 281523 - DNA, 20 bp, synthetic construct
  source 1..20: mol_type = other DNA
gtggtgaaaccccgtctgta

SEQ ID NO: 281524 - DNA, 20 bp, synthetic construct
  source 1..20: mol_type = other DNA
cgtggtgaaaccccgtctgt

SEQ ID NO: 281525 - DNA, 20 bp, synthetic construct
  source 1..20: mol_type = other DNA
acgtggtgaaaccccgtctg

SEQ ID NO: 281526 - DNA, 20 bp, synthetic construct
  source 1..20: mol_type = other DNA
aacgtggtgaaaccccgtct

SEQ ID NO: 281527 - DNA, 20 bp, synthetic construct
  source 1..20: mol_type = other DNA
caacgtggtgaaaccccgtc

SEQ ID NO: 281528 - DNA, 20 bp, synthetic construct
  source 1..20: mol_type = other DNA
ccaacgtggtgaaaccccgt

SEQ ID NO: 281529 - DNA, 20 bp, synthetic construct
  source 1..20: mol_type = other DNA
gccaacgtggtgaaaccccg

SEQ ID NO: 281530 - DNA, 20 bp, synthetic construct
  source 1..20: mol_type = other DNA
ggccaacgtggtgaaacccc

SEQ ID NO: 281531 - DNA, 20 bp, synthetic construct
  source 1..20: mol_type = other DNA
tggccaacgtggtgaaaccc

SEQ ID NO: 281532 - DNA, 20 bp, synthetic construct
  source 1..20: mol_type = other DNA
ctggccaacgtggtgaaacc

SEQ ID NO: 281533 - DNA, 20 bp, synthetic construct
  source 1..20: mol_type = other DNA
cctggccaacgtggtgaaac

SEQ ID NO: 281534 - DNA, 20 bp, synthetic construct
  source 1..20: mol_type = other DNA
gcctggccaacgtggtgaaa

SEQ ID NO: 281535 - DNA, 20 bp, synthetic construct
  source 1..20: mol_type = other DNA
agcctggccaacgtggtgaa

SEQ ID NO: 281536 - DNA, 20 bp, synthetic construct
  source 1..20: mol_type = other DNA
cagcctggccaacgtggtga

SEQ ID NO: 281537 - DNA, 20 bp, synthetic construct
  source 1..20: mol_type = other DNA
gcagcctggccaacgtggtg

SEQ ID NO: 281538 - DNA, 20 bp, synthetic construct
  source 1..20: mol_type = other DNA
agcagcctggccaacgtggt

SEQ ID NO: 281539 - DNA, 20 bp, synthetic construct
  source 1..20: mol_type = other DNA
gagcagcctggccaacgtgg

SEQ ID NO: 281540 - DNA, 20 bp, synthetic construct
  source 1..20: mol_type = other DNA
agagcagcctggccaacgtg

SEQ ID NO: 281541 - DNA, 20 bp, synthetic construct
  source 1..20: mol_type = other DNA
aagagcagcctggccaacgt

SEQ ID NO: 281542 - DNA, 20 bp, synthetic construct
  source 1..20: mol_type = other DNA
caagagcagcctggccaacg

SEQ ID NO: 281543 - DNA, 20 bp, synthetic construct
  source 1..20: mol_type = other DNA
tcaagagcagcctggccaac

SEQ ID NO: 281544 - DNA, 20 bp, synthetic construct
  source 1..20: mol_type = other DNA
ttcaagagcagcctggccaa

SEQ ID NO: 281545 - DNA, 20 bp, synthetic construct
  source 1..20: mol_type = other DNA
gttcaagagcagcctggcca

SEQ ID NO: 281546 - DNA, 20 bp, synthetic construct
  source 1..20: mol_type = other DNA
agttcaagagcagcctggcc

SEQ ID NO: 281547 - DNA, 20 bp, synthetic construct
  source 1..20: mol_type = other DNA
gagttcaagagcagcctggc

SEQ ID NO: 281548 - DNA, 20 bp, synthetic construct
  source 1..20: mol_type = other DNA
ggagttcaagagcagcctgg

SEQ ID NO: 281549 - DNA, 20 bp, synthetic construct
  source 1..20: mol_type = other DNA
aggagttcaagagcagcctg

SEQ ID NO: 281550 - DNA, 20 bp, synthetic construct
  source 1..20: mol_type = other DNA
caggagttcaagagcagcct

SEQ ID NO: 281551 - DNA, 20 bp, synthetic construct
  source 1..20: mol_type = other DNA
tcaggagttcaagagcagcc

SEQ ID NO: 281552 - DNA, 20 bp, synthetic construct
  source 1..20: mol_type = other DNA
gtcaggagttcaagagcagc

SEQ ID NO: 281553 - DNA, 20 bp, synthetic construct
  source 1..20: mol_type = other DNA
cgtcaggagttcaagagcag

SEQ ID NO: 281554 - DNA, 20 bp, synthetic construct
  source 1..20: mol_type = other DNA
acgtcaggagttcaagagca

SEQ ID NO: 281555 - DNA, 20 bp, synthetic construct
  source 1..20: mol_type = other DNA
gacgtcaggagttcaagagc

SEQ ID NO: 281556 - DNA, 20 bp, synthetic construct
  source 1..20: mol_type = other DNA
tgacgtcaggagttcaagag

SEQ ID NO: 281557 - DNA, 20 bp, synthetic construct
  source 1..20: mol_type = other DNA
ctgacgtcaggagttcaaga

SEQ ID NO: 281558 - DNA, 20 bp, synthetic construct
  source 1..20: mol_type = other DNA
cctgacgtcaggagttcaag

SEQ ID NO: 281559 - DNA, 20 bp, synthetic construct
  source 1..20: mol_type = other DNA
acctgacgtcaggagttcaa

SEQ ID NO: 281560 - DNA, 20 bp, synthetic construct
  source 1..20: mol_type = other DNA
cacctgacgtcaggagttca

SEQ ID NO: 281561 - DNA, 20 bp, synthetic construct
  source 1..20: mol_type = other DNA
tcacctgacgtcaggagttc

SEQ ID NO: 281562 - DNA, 20 bp, synthetic construct
  source 1..20: mol_type = other DNA
atcacctgacgtcaggagtt

SEQ ID NO: 281563 - DNA, 20 bp, synthetic construct
  source 1..20: mol_type = other DNA
gatcacctgacgtcaggagt

SEQ ID NO: 281564 - DNA, 20 bp, synthetic construct
  source 1..20: mol_type = other DNA
ggatcacctgacgtcaggag

SEQ ID NO: 281565 - DNA, 20 bp, synthetic construct
  source 1..20: mol_type = other DNA
tggatcacctgacgtcagga

SEQ ID NO: 281566 - DNA, 20 bp, synthetic construct
  source 1..20: mol_type = other DNA
gtggatcacctgacgtcagg

SEQ ID NO: 281567 - DNA, 20 bp, synthetic construct
  source 1..20: mol_type = other DNA
ggtggatcacctgacgtcag

SEQ ID NO: 281568 - DNA, 20 bp, synthetic construct
  source 1..20: mol_type = other DNA
tggtggatcacctgacgtca

SEQ ID NO: 281569 - DNA, 20 bp, synthetic construct
  source 1..20: mol_type = other DNA
ctggtggatcacctgacgtc

SEQ ID NO: 281570 - DNA, 20 bp, synthetic construct
  source 1..20: mol_type = other DNA
gctggtggatcacctgacgt

SEQ ID NO: 281571 - DNA, 20 bp, synthetic construct
  source 1..20: mol_type = other DNA
ggctggtggatcacctgacg

SEQ ID NO: 281572 - DNA, 20 bp, synthetic construct
  source 1..20: mol_type = other DNA
aggctggtggatcacctgac

SEQ ID NO: 281573 - DNA, 20 bp, synthetic construct
  source 1..20: mol_type = other DNA
aaggctggtggatcacctga

SEQ ID NO: 281574 - DNA, 20 bp, synthetic construct
  source 1..20: mol_type = other DNA
caaggctggtggatcacctg

SEQ ID NO: 281575 - DNA, 20 bp, synthetic construct
  source 1..20: mol_type = other DNA
tcaaggctggtggatcacct

SEQ ID NO: 281576 - DNA, 20 bp, synthetic construct
  source 1..20: mol_type = other DNA
gtcaaggctggtggatcacc

SEQ ID NO: 281577 - DNA, 20 bp, synthetic construct
  source 1..20: mol_type = other DNA
ggtcaaggctggtggatcac

SEQ ID NO: 281578 - DNA, 20 bp, synthetic construct
  source 1..20: mol_type = other DNA
aggtcaaggctggtggatca

SEQ ID NO: 281579 - DNA, 20 bp, synthetic construct
  source 1..20: mol_type = other DNA
gaggtcaaggctggtggatc

SEQ ID NO: 281580 - DNA, 20 bp, synthetic construct
  source 1..20: mol_type = other DNA
ggaggtcaaggctggtggat

SEQ ID NO: 281581 - DNA, 20 bp, synthetic construct
  source 1..20: mol_type = other DNA
gggaggtcaaggctggtgga

SEQ ID NO: 281582 - DNA, 20 bp, synthetic construct
  source 1..20: mol_type = other DNA
tgggaggtcaaggctggtgg

SEQ ID NO: 281583 - DNA, 20 bp, synthetic construct
  source 1..20: mol_type = other DNA
ttgggaggtcaaggctggtg

SEQ ID NO: 281584 - DNA, 20 bp, synthetic construct
  source 1..20: mol_type = other DNA
tttgggaggtcaaggctggt

SEQ ID NO: 281585 - DNA, 20 bp, synthetic construct
  source 1..20: mol_type = other DNA
ctttgggaggtcaaggctgg

SEQ ID NO: 281586 - DNA, 20 bp, synthetic construct
  source 1..20: mol_type = other DNA
actttgggaggtcaaggctg

SEQ ID NO: 281587 - DNA, 20 bp, synthetic construct
  source 1..20: mol_type = other DNA
cactttgggaggtcaaggct

SEQ ID NO: 281588 - DNA, 20 bp, synthetic construct
  source 1..20: mol_type = other DNA
gcactttgggaggtcaaggc

SEQ ID NO: 281589 - DNA, 20 bp, synthetic construct
  source 1..20: mol_type = other DNA
agcactttgggaggtcaagg

SEQ ID NO: 281590 - DNA, 20 bp, synthetic construct
  source 1..20: mol_type = other DNA
tagcactttgggaggtcaag

SEQ ID NO: 281591 - DNA, 20 bp, synthetic construct
  source 1..20: mol_type = other DNA
ctagcactttgggaggtcaa

SEQ ID NO: 281592 - DNA, 20 bp, synthetic construct
  source 1..20: mol_type = other DNA
cctagcactttgggaggtca

SEQ ID NO: 281593 - DNA, 20 bp, synthetic construct
  source 1..20: mol_type = other DNA
tcctagcactttgggaggtc

SEQ ID NO: 281594 - DNA, 20 bp, synthetic construct
  source 1..20: mol_type = other DNA
atcctagcactttgggaggt

SEQ ID NO: 281595 - DNA, 20 bp, synthetic construct
  source 1..20: mol_type = other DNA
aatcctagcactttgggagg

SEQ ID NO: 281596 - DNA, 20 bp, synthetic construct
  source 1..20: mol_type = other DNA
taatcctagcactttgggag

SEQ ID NO: 281597 - DNA, 20 bp, synthetic construct
  source 1..20: mol_type = other DNA
gtaatcctagcactttggga

SEQ ID NO: 281598 - DNA, 20 bp, synthetic construct
  source 1..20: mol_type = other DNA
tgtaatcctagcactttggg

SEQ ID NO: 281599 - DNA, 20 bp, synthetic construct
  source 1..20: mol_type = other DNA
ctgtaatcctagcactttgg

SEQ ID NO: 281600 - DNA, 20 bp, synthetic construct
  source 1..20: mol_type = other DNA
cctgtaatcctagcactttg

SEQ ID NO: 281601 - DNA, 20 bp, synthetic construct
  source 1..20: mol_type = other DNA
tcctgtaatcctagcacttt

SEQ ID NO: 281602 - DNA, 20 bp, synthetic construct
  source 1..20: mol_type = other DNA
ctcctgtaatcctagcactt

SEQ ID NO: 281603 - DNA, 20 bp, synthetic construct
  source 1..20: mol_type = other DNA
gctcctgtaatcctagcact

SEQ ID NO: 281604 - DNA, 20 bp, synthetic construct
  source 1..20: mol_type = other DNA
ggctcctgtaatcctagcac

SEQ ID NO: 281605 - DNA, 20 bp, synthetic construct
  source 1..20: mol_type = other DNA
tggctcctgtaatcctagca

SEQ ID NO: 281606 - DNA, 20 bp, synthetic construct
  source 1..20: mol_type = other DNA
gtggctcctgtaatcctagc

SEQ ID NO: 281607 - DNA, 20 bp, synthetic construct
  source 1..20: mol_type = other DNA
agtggctcctgtaatcctag

SEQ ID NO: 281608 - DNA, 20 bp, synthetic construct
  source 1..20: mol_type = other DNA
cagtggctcctgtaatccta

SEQ ID NO: 281609 - DNA, 20 bp, synthetic construct
  source 1..20: mol_type = other DNA
acagtggctcctgtaatcct

SEQ ID NO: 281610 - DNA, 20 bp, synthetic construct
  source 1..20: mol_type = other DNA
tacagtggctcctgtaatcc

SEQ ID NO: 281611 - DNA, 20 bp, synthetic construct
  source 1..20: mol_type = other DNA
gtacagtggctcctgtaatc

SEQ ID NO: 281612 - DNA, 20 bp, synthetic construct
  source 1..20: mol_type = other DNA
ggtacagtggctcctgtaat

SEQ ID NO: 281613 - DNA, 20 bp, synthetic construct
  source 1..20: mol_type = other DNA
gggtacagtggctcctgtaa

SEQ ID NO: 281614 - DNA, 20 bp, synthetic construct
  source 1..20: mol_type = other DNA
tgggtacagtggctcctgta

SEQ ID NO: 281615 - DNA, 20 bp, synthetic construct
  source 1..20: mol_type = other DNA
ctgggtacagtggctcctgt

SEQ ID NO: 281616 - DNA, 20 bp, synthetic construct
  source 1..20: mol_type = other DNA
gctgggtacagtggctcctg

SEQ ID NO: 281617 - DNA, 20 bp, synthetic construct
  source 1..20: mol_type = other DNA
ggctgggtacagtggctcct

SEQ ID NO: 281618 - DNA, 20 bp, synthetic construct
  source 1..20: mol_type = other DNA
aggctgggtacagtggctcc

SEQ ID NO: 281619 - DNA, 20 bp, synthetic construct
  source 1..20: mol_type = other DNA
taggctgggtacagtggctc

SEQ ID NO: 281620 - DNA, 20 bp, synthetic construct
  source 1..20: mol_type = other DNA
ctaggctgggtacagtggct

SEQ ID NO: 281621 - DNA, 20 bp, synthetic construct
  source 1..20: mol_type = other DNA
cctaggctgggtacagtggc

SEQ ID NO: 281622 - DNA, 20 bp, synthetic construct
  source 1..20: mol_type = other DNA
tcctaggctgggtacagtgg

SEQ ID NO: 281623 - DNA, 20 bp, synthetic construct
  source 1..20: mol_type = other DNA
atcctaggctgggtacagtg

SEQ ID NO: 281624 - DNA, 20 bp, synthetic construct
  source 1..20: mol_type = other DNA
tatcctaggctgggtacagt

SEQ ID NO: 281625 - DNA, 20 bp, synthetic construct
  source 1..20: mol_type = other DNA
atatcctaggctgggtacag

SEQ ID NO: 281626 - DNA, 20 bp, synthetic construct
  source 1..20: mol_type = other DNA
catatcctaggctgggtaca

SEQ ID NO: 281627 - DNA, 20 bp, synthetic construct
  source 1..20: mol_type = other DNA
tcatatcctaggctgggtac

SEQ ID NO: 281628 - DNA, 20 bp, synthetic construct
  source 1..20: mol_type = other DNA
atcatatcctaggctgggta

SEQ ID NO: 281629 - DNA, 20 bp, synthetic construct
  source 1..20: mol_type = other DNA
tatcatatcctaggctgggt

SEQ ID NO: 281630 - DNA, 20 bp, synthetic construct
  source 1..20: mol_type = other DNA
atatcatatcctaggctggg

SEQ ID NO: 281631 - DNA, 20 bp, synthetic construct
  source 1..20: mol_type = other DNA
gatatcatatcctaggctgg

SEQ ID NO: 281632 - DNA, 20 bp, synthetic construct
  source 1..20: mol_type = other DNA
tgatatcatatcctaggctg

SEQ ID NO: 281633 - DNA, 20 bp, synthetic construct
  source 1..20: mol_type = other DNA
gtgatatcatatcctaggct

SEQ ID NO: 281634 - DNA, 20 bp, synthetic construct
  source 1..20: mol_type = other DNA
agtgatatcatatcctaggc

SEQ ID NO: 281635 - DNA, 20 bp, synthetic construct
  source 1..20: mol_type = other DNA
aagtgatatcatatcctagg

SEQ ID NO: 281636 - DNA, 20 bp, synthetic construct
  source 1..20: mol_type = other DNA
gaagtgatatcatatcctag

SEQ ID NO: 281637 - DNA, 20 bp, synthetic construct
  source 1..20: mol_type = other DNA
agaagtgatatcatatccta

SEQ ID NO: 281638 - DNA, 20 bp, synthetic construct
  source 1..20: mol_type = other DNA
aagaagtgatatcatatcct

SEQ ID NO: 281639 - DNA, 20 bp, synthetic construct
  source 1..20: mol_type = other DNA
taagaagtgatatcatatcc

SEQ ID NO: 281640 - DNA, 20 bp, synthetic construct
  source 1..20: mol_type = other DNA
ctaagaagtgatatcatatc

SEQ ID NO: 281641 - DNA, 20 bp, synthetic construct
  source 1..20: mol_type = other DNA
tctaagaagtgatatcatat

SEQ ID NO: 281642 - DNA, 20 bp, synthetic construct
  source 1..20: mol_type = other DNA
ctctaagaagtgatatcata

SEQ ID NO: 281643 - DNA, 20 bp, synthetic construct
  source 1..20: mol_type = other DNA
gctctaagaagtgatatcat

SEQ ID NO: 281644 - DNA, 20 bp, synthetic construct
  source 1..20: mol_type = other DNA
tgctctaagaagtgatatca

SEQ ID NO: 281645 - DNA, 20 bp, synthetic construct
  source 1..20: mol_type = other DNA
ttgctctaagaagtgatatc

SEQ ID NO: 281646 - DNA, 20 bp, synthetic construct
  source 1..20: mol_type = other DNA
cttgctctaagaagtgatat

SEQ ID NO: 281647 - DNA, 20 bp, synthetic construct
  source 1..20: mol_type = other DNA
tcttgctctaagaagtgata

SEQ ID NO: 281648 - DNA, 20 bp, synthetic construct
  source 1..20: mol_type = other DNA
atcttgctctaagaagtgat

SEQ ID NO: 281649 - DNA, 20 bp, synthetic construct
  source 1..20: mol_type = other DNA
tatcttgctctaagaagtga

SEQ ID NO: 281650 - DNA, 20 bp, synthetic construct
  source 1..20: mol_type = other DNA
gtatcttgctctaagaagtg

SEQ ID NO: 281651 - DNA, 20 bp, synthetic construct
  source 1..20: mol_type = other DNA
tgtatcttgctctaagaagt

SEQ ID NO: 281652 - DNA, 20 bp, synthetic construct
  source 1..20: mol_type = other DNA
ttgtatcttgctctaagaag

SEQ ID NO: 281653 - DNA, 20 bp, synthetic construct
  source 1..20: mol_type = other DNA
tttgtatcttgctctaagaa

SEQ ID NO: 281654 - DNA, 20 bp, synthetic construct
  source 1..20: mol_type = other DNA
ttttgtatcttgctctaaga

SEQ ID NO: 281655 - DNA, 20 bp, synthetic construct
  source 1..20: mol_type = other DNA
attttgtatcttgctctaag

SEQ ID NO: 281656 - DNA, 20 bp, synthetic construct
  source 1..20: mol_type = other DNA
aattttgtatcttgctctaa

SEQ ID NO: 281657 - DNA, 20 bp, synthetic construct
  source 1..20: mol_type = other DNA
caattttgtatcttgctcta

SEQ ID NO: 281658 - DNA, 20 bp, synthetic construct
  source 1..20: mol_type = other DNA
gcaattttgtatcttgctct

SEQ ID NO: 281659 - DNA, 20 bp, synthetic construct
  source 1..20: mol_type = other DNA
tgcaattttgtatcttgctc

SEQ ID NO: 281660 - DNA, 20 bp, synthetic construct
  source 1..20: mol_type = other DNA
atgcaattttgtatcttgct

SEQ ID NO: 281661 - DNA, 20 bp, synthetic construct
  source 1..20: mol_type = other DNA
catgcaattttgtatcttgc

SEQ ID NO: 281662 - DNA, 20 bp, synthetic construct
  source 1..20: mol_type = other DNA
acatgcaattttgtatcttg

SEQ ID NO: 281663 - DNA, 20 bp, synthetic construct
  source 1..20: mol_type = other DNA
cacatgcaattttgtatctt

SEQ ID NO: 281664 - DNA, 20 bp, synthetic construct
  source 1..20: mol_type = other DNA
gcacatgcaattttgtatct

SEQ ID NO: 281665 - DNA, 20 bp, synthetic construct
  source 1..20: mol_type = other DNA
tgcacatgcaattttgtatc

SEQ ID NO: 281666 - DNA, 20 bp, synthetic construct
  source 1..20: mol_type = other DNA
gtgcacatgcaattttgtat

SEQ ID NO: 281667 - DNA, 20 bp, synthetic construct
  source 1..20: mol_type = other DNA
tgtgcacatgcaattttgta

SEQ ID NO: 281668 - DNA, 20 bp, synthetic construct
  source 1..20: mol_type = other DNA
ttgtgcacatgcaattttgt

SEQ ID NO: 281669 - DNA, 20 bp, synthetic construct
  source 1..20: mol_type = other DNA
attgtgcacatgcaattttg

SEQ ID NO: 281670 - DNA, 20 bp, synthetic construct
  source 1..20: mol_type = other DNA
tattgtgcacatgcaatttt

SEQ ID NO: 281671 - DNA, 20 bp, synthetic construct
  source 1..20: mol_type = other DNA
ttattgtgcacatgcaattt

SEQ ID NO: 281672 - DNA, 20 bp, synthetic construct
  source 1..20: mol_type = other DNA
attattgtgcacatgcaatt

SEQ ID NO: 281673 - DNA, 20 bp, synthetic construct
  source 1..20: mol_type = other DNA
aattattgtgcacatgcaat

SEQ ID NO: 281674 - DNA, 20 bp, synthetic construct
  source 1..20: mol_type = other DNA
gaattattgtgcacatgcaa

SEQ ID NO: 281675 - DNA, 20 bp, synthetic construct
  source 1..20: mol_type = other DNA
agaattattgtgcacatgca

SEQ ID NO: 281676 - DNA, 20 bp, synthetic construct
  source 1..20: mol_type = other DNA
tagaattattgtgcacatgc

SEQ ID NO: 281677 - DNA, 20 bp, synthetic construct
  source 1..20: mol_type = other DNA
gtagaattattgtgcacatg

SEQ ID NO: 281678 - DNA, 20 bp, synthetic construct
  source 1..20: mol_type = other DNA
ggtagaattattgtgcacat

SEQ ID NO: 281679 - DNA, 20 bp, synthetic construct
  source 1..20: mol_type = other DNA
tggtagaattattgtgcaca

SEQ ID NO: 281680 - DNA, 20 bp, synthetic construct
  source 1..20: mol_type = other DNA
ttggtagaattattgtgcac

SEQ ID NO: 281681 - DNA, 20 bp, synthetic construct
  source 1..20: mol_type = other DNA
cttggtagaattattgtgca

SEQ ID NO: 281682 - DNA, 20 bp, synthetic construct
  source 1..20: mol_type = other DNA
acttggtagaattattgtgc

SEQ ID NO: 281683 - DNA, 20 bp, synthetic construct
  source 1..20: mol_type = other DNA
tacttggtagaattattgtg

SEQ ID NO: 281684 - DNA, 20 bp, synthetic construct
  source 1..20: mol_type = other DNA
atacttggtagaattattgt

SEQ ID NO: 281685 - DNA, 20 bp, synthetic construct
  source 1..20: mol_type = other DNA
tatacttggtagaattattg

SEQ ID NO: 281686 - DNA, 20 bp, synthetic construct
  source 1..20: mol_type = other DNA
ctatacttggtagaattatt

SEQ ID NO: 281687 - DNA, 20 bp, synthetic construct
  source 1..20: mol_type = other DNA
cctatacttggtagaattat

SEQ ID NO: 281688 - DNA, 20 bp, synthetic construct
  source 1..20: mol_type = other DNA
acctatacttggtagaatta

SEQ ID NO: 281689 - DNA, 20 bp, synthetic construct
  source 1..20: mol_type = other DNA
tacctatacttggtagaatt

SEQ ID NO: 281690 - DNA, 20 bp, synthetic construct
  source 1..20: mol_type = other DNA
atacctatacttggtagaat

SEQ ID NO: 281691 - DNA, 20 bp, synthetic construct
  source 1..20: mol_type = other DNA
tatacctatacttggtagaa

SEQ ID NO: 281692 - DNA, 20 bp, synthetic construct
  source 1..20: mol_type = other DNA
gtatacctatacttggtaga

SEQ ID NO: 281693 - DNA, 20 bp, synthetic construct
  source 1..20: mol_type = other DNA
tgtatacctatacttggtag

SEQ ID NO: 281694 - DNA, 20 bp, synthetic construct
  source 1..20: mol_type = other DNA
ctgtatacctatacttggta

SEQ ID NO: 281695 - DNA, 20 bp, synthetic construct
  source 1..20: mol_type = other DNA
cctgtatacctatacttggt

SEQ ID NO: 281696 - DNA, 20 bp, synthetic construct
  source 1..20: mol_type = other DNA
ccctgtatacctatacttgg

SEQ ID NO: 281697 - DNA, 20 bp, synthetic construct
  source 1..20: mol_type = other DNA
cccctgtatacctatacttg

SEQ ID NO: 281698 - DNA, 20 bp, synthetic construct
  source 1..20: mol_type = other DNA
acccctgtatacctatactt

SEQ ID NO: 281699 - DNA, 20 bp, synthetic construct
  source 1..20: mol_type = other DNA
tacccctgtatacctatact

SEQ ID NO: 281700 - DNA, 20 bp, synthetic construct
  source 1..20: mol_type = other DNA
ctacccctgtatacctatac

SEQ ID NO: 281701 - DNA, 20 bp, synthetic construct
  source 1..20: mol_type = other DNA
actacccctgtatacctata

SEQ ID NO: 281702 - DNA, 20 bp, synthetic construct
  source 1..20: mol_type = other DNA
aactacccctgtatacctat

SEQ ID NO: 281703 - DNA, 20 bp, synthetic construct
  source 1..20: mol_type = other DNA
taactacccctgtataccta

SEQ ID NO: 281704 - DNA, 20 bp, synthetic construct
  source 1..20: mol_type = other DNA
ataactacccctgtatacct

SEQ ID NO: 281705 - DNA, 20 bp, synthetic construct
  source 1..20: mol_type = other DNA
tataactacccctgtatacc

SEQ ID NO: 281706 - DNA, 20 bp, synthetic construct
  source 1..20: mol_type = other DNA
atataactacccctgtatac

SEQ ID NO: 281707 - DNA, 20 bp, synthetic construct
  source 1..20: mol_type = other DNA
tatataactacccctgtata

SEQ ID NO: 281708 - DNA, 20 bp, synthetic construct
  source 1..20: mol_type = other DNA
atatataactacccctgtat

SEQ ID NO: 281709 - DNA, 20 bp, synthetic construct
  source 1..20: mol_type = other DNA
tatatataactacccctgta

SEQ ID NO: 281710 - DNA, 20 bp, synthetic construct
  source 1..20: mol_type = other DNA
ttatatataactacccctgt

SEQ ID NO: 281711 - DNA, 20 bp, synthetic construct
  source 1..20: mol_type = other DNA
tttatatataactacccctg

SEQ ID NO: 281712 - DNA, 20 bp, synthetic construct
  source 1..20: mol_type = other DNA
atttatatataactacccct

SEQ ID NO: 281713 - DNA, 20 bp, synthetic construct
  source 1..20: mol_type = other DNA
catttatatataactacccc

SEQ ID NO: 281714 - DNA, 20 bp, synthetic construct
  source 1..20: mol_type = other DNA
tcatttatatataactaccc

SEQ ID NO: 281715 - DNA, 20 bp, synthetic construct
  source 1..20: mol_type = other DNA
ctcatttatatataactacc

SEQ ID NO: 281716 - DNA, 20 bp, synthetic construct
  source 1..20: mol_type = other DNA
tctcatttatatataactac

SEQ ID NO: 281717 - DNA, 20 bp, synthetic construct
  source 1..20: mol_type = other DNA
gtctcatttatatataacta

SEQ ID NO: 281718 - DNA, 20 bp, synthetic construct
  source 1..20: mol_type = other DNA
agtctcatttatatataact

SEQ ID NO: 281719 - DNA, 20 bp, synthetic construct
  source 1..20: mol_type = other DNA
aagtctcatttatatataac

SEQ ID NO: 281720 - DNA, 20 bp, synthetic construct
  source 1..20: mol_type = other DNA
gaagtctcatttatatataa

SEQ ID NO: 281721 - DNA, 20 bp, synthetic construct
  source 1..20: mol_type = other DNA
tgaagtctcatttatatata

SEQ ID NO: 281722 - DNA, 20 bp, synthetic construct
  source 1..20: mol_type = other DNA
ttgaagtctcatttatatat

SEQ ID NO: 281723 - DNA, 20 bp, synthetic construct
  source 1..20: mol_type = other DNA
cttgaagtctcatttatata

SEQ ID NO: 281724 - DNA, 20 bp, synthetic construct
  source 1..20: mol_type = other DNA
ccttgaagtctcatttatat

SEQ ID NO: 281725 - DNA, 20 bp, synthetic construct
  source 1..20: mol_type = other DNA
tccttgaagtctcatttata

SEQ ID NO: 281726 - DNA, 20 bp, synthetic construct
  source 1..20: mol_type = other DNA
ttccttgaagtctcatttat

SEQ ID NO: 281727 - DNA, 20 bp, synthetic construct
  source 1..20: mol_type = other DNA
tttccttgaagtctcattta

SEQ ID NO: 281728 - DNA, 20 bp, synthetic construct
  source 1..20: mol_type = other DNA
atttccttgaagtctcattt

SEQ ID NO: 281729 - DNA, 20 bp, synthetic construct
  source 1..20: mol_type = other DNA
tatttccttgaagtctcatt

SEQ ID NO: 281730 - DNA, 20 bp, synthetic construct
  source 1..20: mol_type = other DNA
gtatttccttgaagtctcat

SEQ ID NO: 281731 - DNA, 20 bp, synthetic construct
  source 1..20: mol_type = other DNA
tgtatttccttgaagtctca

SEQ ID NO: 281732 - DNA, 20 bp, synthetic construct
  source 1..20: mol_type = other DNA
ttgtatttccttgaagtctc

SEQ ID NO: 281733 - DNA, 20 bp, synthetic construct
  source 1..20: mol_type = other DNA
gttgtatttccttgaagtct

SEQ ID NO: 281734 - DNA, 20 bp, synthetic construct
  source 1..20: mol_type = other DNA
tgttgtatttccttgaagtc

SEQ ID NO: 281735 - DNA, 20 bp, synthetic construct
  source 1..20: mol_type = other DNA
ttgttgtatttccttgaagt

SEQ ID NO: 281736 - DNA, 20 bp, synthetic construct
  source 1..20: mol_type = other DNA
tttgttgtatttccttgaag

SEQ ID NO: 281737 - DNA, 20 bp, synthetic construct
  source 1..20: mol_type = other DNA
ttttgttgtatttccttgaa

SEQ ID NO: 281738 - DNA, 20 bp, synthetic construct
  source 1..20: mol_type = other DNA
attttgttgtatttccttga

SEQ ID NO: 281739 - DNA, 20 bp, synthetic construct
  source 1..20: mol_type = other DNA
cattttgttgtatttccttg

SEQ ID NO: 281740 - DNA, 20 bp, synthetic construct
  source 1..20: mol_type = other DNA
gcattttgttgtatttcctt

SEQ ID NO: 281741 - DNA, 20 bp, synthetic construct
  source 1..20: mol_type = other DNA
tgcattttgttgtatttcct

SEQ ID NO: 281742 - DNA, 20 bp, synthetic construct
  source 1..20: mol_type = other DNA
ttgcattttgttgtatttcc

SEQ ID NO: 281743 - DNA, 20 bp, synthetic construct
  source 1..20: mol_type = other DNA
attgcattttgttgtatttc

SEQ ID NO: 281744 - DNA, 20 bp, synthetic construct
  source 1..20: mol_type = other DNA
gattgcattttgttgtattt

SEQ ID NO: 281745 - DNA, 20 bp, synthetic construct
  source 1..20: mol_type = other DNA
cgattgcattttgttgtatt

SEQ ID NO: 281746 - DNA, 20 bp, synthetic construct
  source 1..20: mol_type = other DNA
acgattgcattttgttgtat

SEQ ID NO: 281747 - DNA, 20 bp, synthetic construct
  source 1..20: mol_type = other DNA
cacgattgcattttgttgta

SEQ ID NO: 281748 - DNA, 20 bp, synthetic construct
  source 1..20: mol_type = other DNA
tcacgattgcattttgttgt

SEQ ID NO: 281749 - DNA, 20 bp, synthetic construct
  source 1..20: mol_type = other DNA
atcacgattgcattttgttg

SEQ ID NO: 281750 - DNA, 20 bp, synthetic construct
  source 1..20: mol_type = other DNA
aatcacgattgcattttgtt

SEQ ID NO: 281751 - DNA, 20 bp, synthetic construct
  source 1..20: mol_type = other DNA
caatcacgattgcattttgt

SEQ ID NO: 281752 - DNA, 20 bp, synthetic construct
  source 1..20: mol_type = other DNA
acaatcacgattgcattttg

SEQ ID NO: 281753 - DNA, 20 bp, synthetic construct
  source 1..20: mol_type = other DNA
cacaatcacgattgcatttt

SEQ ID NO: 281754 - DNA, 20 bp, synthetic construct
  source 1..20: mol_type = other DNA
acacaatcacgattgcattt

SEQ ID NO: 281755 - DNA, 20 bp, synthetic construct
  source 1..20: mol_type = other DNA
aacacaatcacgattgcatt

SEQ ID NO: 281756 - DNA, 20 bp, synthetic construct
  source 1..20: mol_type = other DNA
taacacaatcacgattgcat

SEQ ID NO: 281757 - DNA, 20 bp, synthetic construct
  source 1..20: mol_type = other DNA
ctaacacaatcacgattgca

SEQ ID NO: 281758 - DNA, 20 bp, synthetic construct
  source 1..20: mol_type = other DNA
cctaacacaatcacgattgc

SEQ ID NO: 281759 - DNA, 20 bp, synthetic construct
  source 1..20: mol_type = other DNA
ccctaacacaatcacgattg

SEQ ID NO: 281760 - DNA, 20 bp, synthetic construct
  source 1..20: mol_type = other DNA
accctaacacaatcacgatt

SEQ ID NO: 281761 - DNA, 20 bp, synthetic construct
  source 1..20: mol_type = other DNA
caccctaacacaatcacgat

SEQ ID NO: 281762 - DNA, 20 bp, synthetic construct
  source 1..20: mol_type = other DNA
ccaccctaacacaatcacga

SEQ ID NO: 281763 - DNA, 20 bp, synthetic construct
  source 1..20: mol_type = other DNA
accaccctaacacaatcacg

SEQ ID NO: 281764 - DNA, 20 bp, synthetic construct
  source 1..20: mol_type = other DNA
taccaccctaacacaatcac

SEQ ID NO: 281765 - DNA, 20 bp, synthetic construct
  source 1..20: mol_type = other DNA
ttaccaccctaacacaatca

SEQ ID NO: 281766 - DNA, 20 bp, synthetic construct
  source 1..20: mol_type = other DNA
cttaccaccctaacacaatc

SEQ ID NO: 281767 - DNA, 20 bp, synthetic construct
  source 1..20: mol_type = other DNA
tcttaccaccctaacacaat

SEQ ID NO: 281768 - DNA, 20 bp, synthetic construct
  source 1..20: mol_type = other DNA
ttcttaccaccctaacacaa

SEQ ID NO: 281769 - DNA, 20 bp, synthetic construct
  source 1..20: mol_type = other DNA
tttcttaccaccctaacaca

SEQ ID NO: 281770 - DNA, 20 bp, synthetic construct
  source 1..20: mol_type = other DNA
ttttcttaccaccctaacac

SEQ ID NO: 281771 - DNA, 20 bp, synthetic construct
  source 1..20: mol_type = other DNA
gttttcttaccaccctaaca

SEQ ID NO: 281772 - DNA, 20 bp, synthetic construct
  source 1..20: mol_type = other DNA
cgttttcttaccaccctaac

SEQ ID NO: 281773 - DNA, 20 bp, synthetic construct
  source 1..20: mol_type = other DNA
ccgttttcttaccaccctaa

SEQ ID NO: 281774 - DNA, 20 bp, synthetic construct
  source 1..20: mol_type = other DNA
accgttttcttaccacccta

SEQ ID NO: 281775 - DNA, 20 bp, synthetic construct
  source 1..20: mol_type = other DNA
aaccgttttcttaccaccct

SEQ ID NO: 281776 - DNA, 20 bp, synthetic construct
  source 1..20: mol_type = other DNA
aaaccgttttcttaccaccc

SEQ ID NO: 281777 - DNA, 20 bp, synthetic construct
  source 1..20: mol_type = other DNA
aaaaccgttttcttaccacc

SEQ ID NO: 281778 - DNA, 20 bp, synthetic construct
  source 1..20: mol_type = other DNA
aaaaaccgttttcttaccac

SEQ ID NO: 281779 - DNA, 20 bp, synthetic construct
  source 1..20: mol_type = other DNA
caaaaaccgttttcttacca

SEQ ID NO: 281780 - DNA, 20 bp, synthetic construct
  source 1..20: mol_type = other DNA
gcaaaaaccgttttcttacc

SEQ ID NO: 281781 - DNA, 20 bp, synthetic construct
  source 1..20: mol_type = other DNA
agcaaaaaccgttttcttac

SEQ ID NO: 281782 - DNA, 20 bp, synthetic construct
  source 1..20: mol_type = other DNA
aagcaaaaaccgttttctta

SEQ ID NO: 281783 - DNA, 20 bp, synthetic construct
  source 1..20: mol_type = other DNA
aaagcaaaaaccgttttctt

SEQ ID NO: 281784 - DNA, 20 bp, synthetic construct
  source 1..20: mol_type = other DNA
caaagcaaaaaccgttttct

SEQ ID NO: 281785 - DNA, 20 bp, synthetic construct
  source 1..20: mol_type = other DNA
tcaaagcaaaaaccgttttc

SEQ ID NO: 281786 - DNA, 20 bp, synthetic construct
  source 1..20: mol_type = other DNA
atcaaagcaaaaaccgtttt

SEQ ID NO: 281787 - DNA, 20 bp, synthetic construct
  source 1..20: mol_type = other DNA
catcaaagcaaaaaccgttt

SEQ ID NO: 281788 - DNA, 20 bp, synthetic construct
  source 1..20: mol_type = other DNA
tcatcaaagcaaaaaccgtt

SEQ ID NO: 281789 - DNA, 20 bp, synthetic construct
  source 1..20: mol_type = other DNA
ctcatcaaagcaaaaaccgt

SEQ ID NO: 281790 - DNA, 20 bp, synthetic construct
  source 1..20: mol_type = other DNA
gctcatcaaagcaaaaaccg

SEQ ID NO: 281791 - DNA, 20 bp, synthetic construct
  source 1..20: mol_type = other DNA
agctcatcaaagcaaaaacc

SEQ ID NO: 281792 - DNA, 20 bp, synthetic construct
  source 1..20: mol_type = other DNA
gagctcatcaaagcaaaaac

SEQ ID NO: 281793 - DNA, 20 bp, synthetic construct
  source 1..20: mol_type = other DNA
agagctcatcaaagcaaaaa

SEQ ID NO: 281794 - DNA, 20 bp, synthetic construct
  source 1..20: mol_type = other DNA
cagagctcatcaaagcaaaa

SEQ ID NO: 281795 - DNA, 20 bp, synthetic construct
  source 1..20: mol_type = other DNA
acagagctcatcaaagcaaa

SEQ ID NO: 281796 - DNA, 20 bp, synthetic construct
  source 1..20: mol_type = other DNA
aacagagctcatcaaagcaa

SEQ ID NO: 281797 - DNA, 20 bp, synthetic construct
  source 1..20: mol_type = other DNA
aaacagagctcatcaaagca

SEQ ID NO: 281798 - DNA, 20 bp, synthetic construct
  source 1..20: mol_type = other DNA
aaaacagagctcatcaaagc

SEQ ID NO: 281799 - DNA, 20 bp, synthetic construct
  source 1..20: mol_type = other DNA
aaaaacagagctcatcaaag

SEQ ID NO: 281800 - DNA, 20 bp, synthetic construct
  source 1..20: mol_type = other DNA
aaaaaacagagctcatcaaa

SEQ ID NO: 281801 - DNA, 20 bp, synthetic construct
  source 1..20: mol_type = other DNA
taaaaaacagagctcatcaa

SEQ ID NO: 281802 - DNA, 20 bp, synthetic construct
  source 1..20: mol_type = other DNA
ttaaaaaacagagctcatca

SEQ ID NO: 281803 - DNA, 20 bp, synthetic construct
  source 1..20: mol_type = other DNA
tttaaaaaacagagctcatc

SEQ ID NO: 281804 - DNA, 20 bp, synthetic construct
  source 1..20: mol_type = other DNA
ttttaaaaaacagagctcat

SEQ ID NO: 281805 - DNA, 20 bp, synthetic construct
  source 1..20: mol_type = other DNA
attttaaaaaacagagctca

SEQ ID NO: 281806 - DNA, 20 bp, synthetic construct
  source 1..20: mol_type = other DNA
gattttaaaaaacagagctc

SEQ ID NO: 281807 - DNA, 20 bp, synthetic construct
  source 1..20: mol_type = other DNA
cgattttaaaaaacagagct

SEQ ID NO: 281808 - DNA, 20 bp, synthetic construct
  source 1..20: mol_type = other DNA
acgattttaaaaaacagagc

SEQ ID NO: 281809 - DNA, 20 bp, synthetic construct
  source 1..20: mol_type = other DNA
aacgattttaaaaaacagag

SEQ ID NO: 281810 - DNA, 20 bp, synthetic construct
  source 1..20: mol_type = other DNA
taacgattttaaaaaacaga

SEQ ID NO: 281811 - DNA, 20 bp, synthetic construct
  source 1..20: mol_type = other DNA
ataacgattttaaaaaacag

SEQ ID NO: 281812 - DNA, 20 bp, synthetic construct
  source 1..20: mol_type = other DNA
tataacgattttaaaaaaca

SEQ ID NO: 281813 - DNA, 20 bp, synthetic construct
  source 1..20: mol_type = other DNA
atataacgattttaaaaaac

SEQ ID NO: 281814 - DNA, 20 bp, synthetic construct
  source 1..20: mol_type = other DNA
aatataacgattttaaaaaa

SEQ ID NO: 281815 - DNA, 20 bp, synthetic construct
  source 1..20: mol_type = other DNA
aaatataacgattttaaaaa

SEQ ID NO: 281816 - DNA, 20 bp, synthetic construct
  source 1..20: mol_type = other DNA
aaaatataacgattttaaaa

SEQ ID NO: 281817 - DNA, 20 bp, synthetic construct
  source 1..20: mol_type = other DNA
gaaaatataacgattttaaa

SEQ ID NO: 281818 - DNA, 20 bp, synthetic construct
  source 1..20: mol_type = other DNA
agaaaatataacgattttaa

SEQ ID NO: 281819 - DNA, 20 bp, synthetic construct
  source 1..20: mol_type = other DNA
tagaaaatataacgatttta

SEQ ID NO: 281820 - DNA, 20 bp, synthetic construct
  source 1..20: mol_type = other DNA
ttagaaaatataacgatttt

SEQ ID NO: 281821 - DNA, 20 bp, synthetic construct
  source 1..20: mol_type = other DNA
attagaaaatataacgattt

SEQ ID NO: 281822 - DNA, 20 bp, synthetic construct
  source 1..20: mol_type = other DNA
tattagaaaatataacgatt

SEQ ID NO: 281823 - DNA, 20 bp, synthetic construct
  source 1..20: mol_type = other DNA
ttattagaaaatataacgat

SEQ ID NO: 281824 - DNA, 20 bp, synthetic construct
  source 1..20: mol_type = other DNA
tttattagaaaatataacga

SEQ ID NO: 281825 - DNA, 20 bp, synthetic construct
  source 1..20: mol_type = other DNA
ttttattagaaaatataacg

SEQ ID NO: 281826 - DNA, 20 bp, synthetic construct
  source 1..20: mol_type = other DNA
tttttattagaaaatataac

SEQ ID NO: 281827 - DNA, 20 bp, synthetic construct
  source 1..20: mol_type = other DNA
atttttattagaaaatataa

SEQ ID NO: 281828 - DNA, 20 bp, synthetic construct
  source 1..20: mol_type = other DNA
tatttttattagaaaatata

SEQ ID NO: 281829 - DNA, 20 bp, synthetic construct
  source 1..20: mol_type = other DNA
gtatttttattagaaaatat

SEQ ID NO: 281830 - DNA, 20 bp, synthetic construct
  source 1..20: mol_type = other DNA
tgtatttttattagaaaata

SEQ ID NO: 281831 - DNA, 20 bp, synthetic construct
  source 1..20: mol_type = other DNA
atgtatttttattagaaaat

SEQ ID NO: 281832 - DNA, 20 bp, synthetic construct
  source 1..20: mol_type = other DNA
tatgtatttttattagaaaa

SEQ ID NO: 281833 - DNA, 20 bp, synthetic construct
  source 1..20: mol_type = other DNA
ctatgtatttttattagaaa

SEQ ID NO: 281834 - DNA, 20 bp, synthetic construct
  source 1..20: mol_type = other DNA
actatgtatttttattagaa

SEQ ID NO: 281835 - DNA, 20 bp, synthetic construct
  source 1..20: mol_type = other DNA
gactatgtatttttattaga

SEQ ID NO: 281836 - DNA, 20 bp, synthetic construct
  source 1..20: mol_type = other DNA
agactatgtatttttattag

SEQ ID NO: 281837 - DNA, 20 bp, synthetic construct
  source 1..20: mol_type = other DNA
aagactatgtatttttatta

SEQ ID NO: 281838 - DNA, 20 bp, synthetic construct
  source 1..20: mol_type = other DNA
aaagactatgtatttttatt

SEQ ID NO: 281839 - DNA, 20 bp, synthetic construct
  source 1..20: mol_type = other DNA
aaaagactatgtatttttat

SEQ ID NO: 281840 - DNA, 20 bp, synthetic construct
  source 1..20: mol_type = other DNA
caaaagactatgtattttta

SEQ ID NO: 281841 - DNA, 20 bp, synthetic construct
  source 1..20: mol_type = other DNA
tcaaaagactatgtattttt

SEQ ID NO: 281842 - DNA, 20 bp, synthetic construct
  source 1..20: mol_type = other DNA
ttcaaaagactatgtatttt

SEQ ID NO: 281843 - DNA, 20 bp, synthetic construct
  source 1..20: mol_type = other DNA
cttcaaaagactatgtattt

SEQ ID NO: 281844 - DNA, 20 bp, synthetic construct
  source 1..20: mol_type = other DNA
ccttcaaaagactatgtatt

SEQ ID NO: 281845 - DNA, 20 bp, synthetic construct
  source 1..20: mol_type = other DNA
tccttcaaaagactatgtat

SEQ ID NO: 281846 - DNA, 20 bp, synthetic construct
  source 1..20: mol_type = other DNA
ttccttcaaaagactatgta

SEQ ID NO: 281847 - DNA, 20 bp, synthetic construct
  source 1..20: mol_type = other DNA
gttccttcaaaagactatgt

SEQ ID NO: 281848 - DNA, 20 bp, synthetic construct
  source 1..20: mol_type = other DNA
tgttccttcaaaagactatg

SEQ ID NO: 281849 - DNA, 20 bp, synthetic construct
  source 1..20: mol_type = other DNA
atgttccttcaaaagactat

SEQ ID NO: 281850 - DNA, 20 bp, synthetic construct
  source 1..20: mol_type = other DNA
tatgttccttcaaaagacta

SEQ ID NO: 281851 - DNA, 20 bp, synthetic construct
  source 1..20: mol_type = other DNA
ttatgttccttcaaaagact

SEQ ID NO: 281852 - DNA, 20 bp, synthetic construct
  source 1..20: mol_type = other DNA
tttatgttccttcaaaagac

SEQ ID NO: 281853 - DNA, 20 bp, synthetic construct
  source 1..20: mol_type = other DNA
ttttatgttccttcaaaaga

SEQ ID NO: 281854 - DNA, 20 bp, synthetic construct
  source 1..20: mol_type = other DNA
cttttatgttccttcaaaag

SEQ ID NO: 281855 - DNA, 20 bp, synthetic construct
  source 1..20: mol_type = other DNA
tcttttatgttccttcaaaa

SEQ ID NO: 281856 - DNA, 20 bp, synthetic construct
  source 1..20: mol_type = other DNA
atcttttatgttccttcaaa

SEQ ID NO: 281857 - DNA, 20 bp, synthetic construct
  source 1..20: mol_type = other DNA
aatcttttatgttccttcaa

SEQ ID NO: 281858 - DNA, 20 bp, synthetic construct
  source 1..20: mol_type = other DNA
taatcttttatgttccttca

SEQ ID NO: 281859 - DNA, 20 bp, synthetic construct
  source 1..20: mol_type = other DNA
ataatcttttatgttccttc

SEQ ID NO: 281860 - DNA, 20 bp, synthetic construct
  source 1..20: mol_type = other DNA
cataatcttttatgttcctt

SEQ ID NO: 281861 - DNA, 20 bp, synthetic construct
  source 1..20: mol_type = other DNA
tcataatcttttatgttcct

SEQ ID NO: 281862 - DNA, 20 bp, synthetic construct
  source 1..20: mol_type = other DNA
ttcataatcttttatgttcc

SEQ ID NO: 281863 - DNA, 20 bp, synthetic construct
  source 1..20: mol_type = other DNA
cttcataatcttttatgttc

SEQ ID NO: 281864 - DNA, 20 bp, synthetic construct
  source 1..20: mol_type = other DNA
tcttcataatcttttatgtt

SEQ ID NO: 281865 - DNA, 20 bp, synthetic construct
  source 1..20: mol_type = other DNA
ttcttcataatcttttatgt

SEQ ID NO: 281866 - DNA, 20 bp, synthetic construct
  source 1..20: mol_type = other DNA
tttcttcataatcttttatg

SEQ ID NO: 281867 - DNA, 20 bp, synthetic construct
  source 1..20: mol_type = other DNA
atttcttcataatcttttat

SEQ ID NO: 281868 - DNA, 20 bp, synthetic construct
  source 1..20: mol_type = other DNA
catttcttcataatctttta

SEQ ID NO: 281869 - DNA, 20 bp, synthetic construct
  source 1..20: mol_type = other DNA
tcatttcttcataatctttt

SEQ ID NO: 281870 - DNA, 20 bp, synthetic construct
  source 1..20: mol_type = other DNA
ctcatttcttcataatcttt

SEQ ID NO: 281871 - DNA, 20 bp, synthetic construct
  source 1..20: mol_type = other DNA
actcatttcttcataatctt

SEQ ID NO: 281872 - DNA, 20 bp, synthetic construct
  source 1..20: mol_type = other DNA
aactcatttcttcataatct

SEQ ID NO: 281873 - DNA, 20 bp, synthetic construct
  source 1..20: mol_type = other DNA
taactcatttcttcataatc

SEQ ID NO: 281874 - DNA, 20 bp, synthetic construct
  source 1..20: mol_type = other DNA
ctaactcatttcttcataat

SEQ ID NO: 281875 - DNA, 20 bp, synthetic construct
  source 1..20: mol_type = other DNA
tctaactcatttcttcataa

SEQ ID NO: 281876 - DNA, 20 bp, synthetic construct
  source 1..20: mol_type = other DNA
atctaactcatttcttcata

SEQ ID NO: 281877 - DNA, 20 bp, synthetic construct
  source 1..20: mol_type = other DNA
tatctaactcatttcttcat

SEQ ID NO: 281878 - DNA, 20 bp, synthetic construct
  source 1..20: mol_type = other DNA
atatctaactcatttcttca

SEQ ID NO: 281879 - DNA, 20 bp, synthetic construct
  source 1..20: mol_type = other DNA
aatatctaactcatttcttc

SEQ ID NO: 281880 - DNA, 20 bp, synthetic construct
  source 1..20: mol_type = other DNA
caatatctaactcatttctt

SEQ ID NO: 281881 - DNA, 20 bp, synthetic construct
  source 1..20: mol_type = other DNA
tcaatatctaactcatttct

SEQ ID NO: 281882 - DNA, 20 bp, synthetic construct
  source 1..20: mol_type = other DNA
atcaatatctaactcatttc

SEQ ID NO: 281883 - DNA, 20 bp, synthetic construct
  source 1..20: mol_type = other DNA
aatcaatatctaactcattt

SEQ ID NO: 281884 - DNA, 20 bp, synthetic construct
  source 1..20: mol_type = other DNA
gaatcaatatctaactcatt

SEQ ID NO: 281885 - DNA, 20 bp, synthetic construct
  source 1..20: mol_type = other DNA
ggaatcaatatctaactcat

SEQ ID NO: 281886 - DNA, 20 bp, synthetic construct
  source 1..20: mol_type = other DNA
aggaatcaatatctaactca

SEQ ID NO: 281887 - DNA, 20 bp, synthetic construct
  source 1..20: mol_type = other DNA
taggaatcaatatctaactc

SEQ ID NO: 281888 - DNA, 20 bp, synthetic construct
  source 1..20: mol_type = other DNA
ataggaatcaatatctaact

SEQ ID NO: 281889 - DNA, 20 bp, synthetic construct
  source 1..20: mol_type = other DNA
aataggaatcaatatctaac

SEQ ID NO: 281890 - DNA, 20 bp, synthetic construct
  source 1..20: mol_type = other DNA
caataggaatcaatatctaa

SEQ ID NO: 281891 - DNA, 20 bp, synthetic construct
  source 1..20: mol_type = other DNA
tcaataggaatcaatatcta

SEQ ID NO: 281892 - DNA, 20 bp, synthetic construct
  source 1..20: mol_type = other DNA
ttcaataggaatcaatatct

SEQ ID NO: 281893 - DNA, 20 bp, synthetic construct
  source 1..20: mol_type = other DNA
cttcaataggaatcaatatc

SEQ ID NO: 281894 - DNA, 20 bp, synthetic construct
  source 1..20: mol_type = other DNA
tcttcaataggaatcaatat

SEQ ID NO: 281895 - DNA, 20 bp, synthetic construct
  source 1..20: mol_type = other DNA
atcttcaataggaatcaata

SEQ ID NO: 281896 - DNA, 20 bp, synthetic construct
  source 1..20: mol_type = other DNA
aatcttcaataggaatcaat

SEQ ID NO: 281897 - DNA, 20 bp, synthetic construct
  source 1..20: mol_type = other DNA
gaatcttcaataggaatcaa

SEQ ID NO: 281898 - DNA, 20 bp, synthetic construct
  source 1..20: mol_type = other DNA
tgaatcttcaataggaatca

SEQ ID NO: 281899 - DNA, 20 bp, synthetic construct
  source 1..20: mol_type = other DNA
ctgaatcttcaataggaatc

SEQ ID NO: 281900 - DNA, 20 bp, synthetic construct
  source 1..20: mol_type = other DNA
tctgaatcttcaataggaat

SEQ ID NO: 281901 - DNA, 20 bp, synthetic construct
  source 1..20: mol_type = other DNA
gtctgaatcttcaataggaa

SEQ ID NO: 281902 - DNA, 20 bp, synthetic construct
  source 1..20: mol_type = other DNA
tgtctgaatcttcaatagga

SEQ ID NO: 281903 - DNA, 20 bp, synthetic construct
  source 1..20: mol_type = other DNA
ttgtctgaatcttcaatagg

SEQ ID NO: 281904 - DNA, 20 bp, synthetic construct
  source 1..20: mol_type = other DNA
cttgtctgaatcttcaatag

SEQ ID NO: 281905 - DNA, 20 bp, synthetic construct
  source 1..20: mol_type = other DNA
acttgtctgaatcttcaata

SEQ ID NO: 281906 - DNA, 20 bp, synthetic construct
  source 1..20: mol_type = other DNA
tacttgtctgaatcttcaat

SEQ ID NO: 281907 - DNA, 20 bp, synthetic construct
  source 1..20: mol_type = other DNA
ttacttgtctgaatcttcaa

SEQ ID NO: 281908 - DNA, 20 bp, synthetic construct
  source 1..20: mol_type = other DNA
tttacttgtctgaatcttca

SEQ ID NO: 281909 - DNA, 20 bp, synthetic construct
  source 1..20: mol_type = other DNA
ttttacttgtctgaatcttc

SEQ ID NO: 281910 - DNA, 20 bp, synthetic construct
  source 1..20: mol_type = other DNA
attttacttgtctgaatctt

SEQ ID NO: 281911 - DNA, 20 bp, synthetic construct
  source 1..20: mol_type = other DNA
aattttacttgtctgaatct

SEQ ID NO: 281912 - DNA, 20 bp, synthetic construct
  source 1..20: mol_type = other DNA
taattttacttgtctgaatc

SEQ ID NO: 281913 - DNA, 20 bp, synthetic construct
  source 1..20: mol_type = other DNA
ttaattttacttgtctgaat

SEQ ID NO: 281914 - DNA, 20 bp, synthetic construct
  source 1..20: mol_type = other DNA
cttaattttacttgtctgaa

SEQ ID NO: 281915 - DNA, 20 bp, synthetic construct
  source 1..20: mol_type = other DNA
ccttaattttacttgtctga

SEQ ID NO: 281916 - DNA, 20 bp, synthetic construct
  source 1..20: mol_type = other DNA
cccttaattttacttgtctg

SEQ ID NO: 281917 - DNA, 20 bp, synthetic construct
  source 1..20: mol_type = other DNA
ccccttaattttacttgtct

SEQ ID NO: 281918 - DNA, 20 bp, synthetic construct
  source 1..20: mol_type = other DNA
tccccttaattttacttgtc

SEQ ID NO: 281919 - DNA, 20 bp, synthetic construct
  source 1..20: mol_type = other DNA
ttccccttaattttacttgt

SEQ ID NO: 281920 - DNA, 20 bp, synthetic construct
  source 1..20: mol_type = other DNA
tttccccttaattttacttg

SEQ ID NO: 281921 - DNA, 20 bp, synthetic construct
  source 1..20: mol_type = other DNA
ttttccccttaattttactt

SEQ ID NO: 281922 - DNA, 20 bp, synthetic construct
  source 1..20: mol_type = other DNA
tttttccccttaattttact

SEQ ID NO: 281923 - DNA, 20 bp, synthetic construct
  source 1..20: mol_type = other DNA
ttttttccccttaattttac

SEQ ID NO: 281924 - DNA, 20 bp, synthetic construct
  source 1..20: mol_type = other DNA
tttttttccccttaatttta

SEQ ID NO: 281925 - DNA, 20 bp, synthetic construct
  source 1..20: mol_type = other DNA
ttttttttccccttaatttt

SEQ ID NO: 281926 - DNA, 20 bp, synthetic construct
  source 1..20: mol_type = other DNA
gttttttttccccttaattt

SEQ ID NO: 281927 - DNA, 20 bp, synthetic construct
  source 1..20: mol_type = other DNA
cgttttttttccccttaatt

SEQ ID NO: 281928 - DNA, 20 bp, synthetic construct
  source 1..20: mol_type = other DNA
ccgttttttttccccttaat

SEQ ID NO: 281929 - DNA, 20 bp, synthetic construct
  source 1..20: mol_type = other DNA
cccgttttttttccccttaa

SEQ ID NO: 281930 - DNA, 20 bp, synthetic construct
  source 1..20: mol_type = other DNA
tcccgttttttttcccctta

SEQ ID NO: 281931 - DNA, 20 bp, synthetic construct
  source 1..20: mol_type = other DNA
atcccgttttttttcccctt

SEQ ID NO: 281932 - DNA, 20 bp, synthetic construct
  source 1..20: mol_type = other DNA
catcccgttttttttcccct

SEQ ID NO: 281933 - DNA, 20 bp, synthetic construct
  source 1..20: mol_type = other DNA
tcatcccgttttttttcccc

SEQ ID NO: 281934 - DNA, 20 bp, synthetic construct
  source 1..20: mol_type = other DNA
ttcatcccgttttttttccc

SEQ ID NO: 281935 - DNA, 20 bp, synthetic construct
  source 1..20: mol_type = other DNA
gttcatcccgttttttttcc

SEQ ID NO: 281936 - DNA, 20 bp, synthetic construct
  source 1..20: mol_type = other DNA
ggttcatcccgttttttttc

SEQ ID NO: 281937 - DNA, 20 bp, synthetic construct
  source 1..20: mol_type = other DNA
tggttcatcccgtttttttt

SEQ ID NO: 281938 - DNA, 20 bp, synthetic construct
  source 1..20: mol_type = other DNA
ctggttcatcccgttttttt

SEQ ID NO: 281939 - DNA, 20 bp, synthetic construct
  source 1..20: mol_type = other DNA
tctggttcatcccgtttttt

SEQ ID NO: 281940 - DNA, 20 bp, synthetic construct
  source 1..20: mol_type = other DNA
ttctggttcatcccgttttt

SEQ ID NO: 281941 - DNA, 20 bp, synthetic construct
  source 1..20: mol_type = other DNA
cttctggttcatcccgtttt

SEQ ID NO: 281942 - DNA, 20 bp, synthetic construct
  source 1..20: mol_type = other DNA
acttctggttcatcccgttt

SEQ ID NO: 281943 - DNA, 20 bp, synthetic construct
  source 1..20: mol_type = other DNA
gacttctggttcatcccgtt

SEQ ID NO: 281944 - DNA, 20 bp, synthetic construct
  source 1..20: mol_type = other DNA
tgacttctggttcatcccgt

SEQ ID NO: 281945 - DNA, 20 bp, synthetic construct
  source 1..20: mol_type = other DNA
ctgacttctggttcatcccg

SEQ ID NO: 281946 - DNA, 20 bp, synthetic construct
  source 1..20: mol_type = other DNA
cctgacttctggttcatccc

SEQ ID NO: 281947 - DNA, 20 bp, synthetic construct
  source 1..20: mol_type = other DNA
gcctgacttctggttcatcc

SEQ ID NO: 281948 - DNA, 20 bp, synthetic construct
  source 1..20: mol_type = other DNA
agcctgacttctggttcatc

SEQ ID NO: 281949 - DNA, 20 bp, synthetic construct
  source 1..20: mol_type = other DNA
cagcctgacttctggttcat

SEQ ID NO: 281950 - DNA, 20 bp, synthetic construct
  source 1..20: mol_type = other DNA
ccagcctgacttctggttca

SEQ ID NO: 281951 - DNA, 20 bp, synthetic construct
  source 1..20: mol_type = other DNA
tccagcctgacttctggttc

SEQ ID NO: 281952 - DNA, 20 bp, synthetic construct
  source 1..20: mol_type = other DNA
ctccagcctgacttctggtt

SEQ ID NO: 281953 - DNA, 20 bp, synthetic construct
  source 1..20: mol_type = other DNA
actccagcctgacttctggt

SEQ ID NO: 281954 - DNA, 20 bp, synthetic construct
  source 1..20: mol_type = other DNA
aactccagcctgacttctgg

SEQ ID NO: 281955 - DNA, 20 bp, synthetic construct
  source 1..20: mol_type = other DNA
gaactccagcctgacttctg

SEQ ID NO: 281956 - DNA, 20 bp, synthetic construct
  source 1..20: mol_type = other DNA
ggaactccagcctgacttct

SEQ ID NO: 281957 - DNA, 20 bp, synthetic construct
  source 1..20: mol_type = other DNA
tggaactccagcctgacttc

SEQ ID NO: 281958 - DNA, 20 bp, synthetic construct
  source 1..20: mol_type = other DNA
ttggaactccagcctgactt

SEQ ID NO: 281959 - DNA, 20 bp, synthetic construct
  source 1..20: mol_type = other DNA
gttggaactccagcctgact

SEQ ID NO: 281960 - DNA, 20 bp, synthetic construct
  source 1..20: mol_type = other DNA
ggttggaactccagcctgac

SEQ ID NO: 281961 - DNA, 20 bp, synthetic construct
  source 1..20: mol_type = other DNA
gggttggaactccagcctga

SEQ ID NO: 281962 - DNA, 20 bp, synthetic construct
  source 1..20: mol_type = other DNA
ggggttggaactccagcctg

SEQ ID NO: 281963 - DNA, 20 bp, synthetic construct
  source 1..20: mol_type = other DNA
tggggttggaactccagcct

SEQ ID NO: 281964 - DNA, 20 bp, synthetic construct
  source 1..20: mol_type = other DNA
ctggggttggaactccagcc

SEQ ID NO: 281965 - DNA, 20 bp, synthetic construct
  source 1..20: mol_type = other DNA
tctggggttggaactccagc

SEQ ID NO: 281966 - DNA, 20 bp, synthetic construct
  source 1..20: mol_type = other DNA
atctggggttggaactccag

SEQ ID NO: 281967 - DNA, 20 bp, synthetic construct
  source 1..20: mol_type = other DNA
gatctggggttggaactcca

SEQ ID NO: 281968 - DNA, 20 bp, synthetic construct
  source 1..20: mol_type = other DNA
ggatctggggttggaactcc

SEQ ID NO: 281969 - DNA, 20 bp, synthetic construct
  source 1..20: mol_type = other DNA
cggatctggggttggaactc

SEQ ID NO: 281970 - DNA, 20 bp, synthetic construct
  source 1..20: mol_type = other DNA
tcggatctggggttggaact

SEQ ID NO: 281971 - DNA, 20 bp, synthetic construct
  source 1..20: mol_type = other DNA
gtcggatctggggttggaac

SEQ ID NO: 281972 - DNA, 20 bp, synthetic construct
  source 1..20: mol_type = other DNA
tgtcggatctggggttggaa

SEQ ID NO: 281973 - DNA, 20 bp, synthetic construct
  source 1..20: mol_type = other DNA
ctgtcggatctggggttgga

SEQ ID NO: 281974 - DNA, 20 bp, synthetic construct
  source 1..20: mol_type = other DNA
gctgtcggatctggggttgg

SEQ ID NO: 281975 - DNA, 20 bp, synthetic construct
  source 1..20: mol_type = other DNA
ggctgtcggatctggggttg

SEQ ID NO: 281976 - DNA, 20 bp, synthetic construct
  source 1..20: mol_type = other DNA
gggctgtcggatctggggtt

SEQ ID NO: 281977 - DNA, 20 bp, synthetic construct
  source 1..20: mol_type = other DNA
tgggctgtcggatctggggt

SEQ ID NO: 281978 - DNA, 20 bp, synthetic construct
  source 1..20: mol_type = other DNA
ctgggctgtcggatctgggg

SEQ ID NO: 281979 - DNA, 20 bp, synthetic construct
  source 1..20: mol_type = other DNA
cctgggctgtcggatctggg

SEQ ID NO: 281980 - DNA, 20 bp, synthetic construct
  source 1..20: mol_type = other DNA
gcctgggctgtcggatctgg

SEQ ID NO: 281981 - DNA, 20 bp, synthetic construct
  source 1..20: mol_type = other DNA
agcctgggctgtcggatctg

SEQ ID NO: 281982 - DNA, 20 bp, synthetic construct
  source 1..20: mol_type = other DNA
cagcctgggctgtcggatct

SEQ ID NO: 281983 - DNA, 20 bp, synthetic construct
  source 1..20: mol_type = other DNA
tcagcctgggctgtcggatc

SEQ ID NO: 281984 - DNA, 20 bp, synthetic construct
  source 1..20: mol_type = other DNA
atcagcctgggctgtcggat

SEQ ID NO: 281985 - DNA, 20 bp, synthetic construct
  source 1..20: mol_type = other DNA
catcagcctgggctgtcgga

SEQ ID NO: 281986 - DNA, 20 bp, synthetic construct
  source 1..20: mol_type = other DNA
ccatcagcctgggctgtcgg

SEQ ID NO: 281987 - DNA, 20 bp, synthetic construct
  source 1..20: mol_type = other DNA
cccatcagcctgggctgtcg

SEQ ID NO: 281988 - DNA, 20 bp, synthetic construct
  source 1..20: mol_type = other DNA
ccccatcagcctgggctgtc

SEQ ID NO: 281989 - DNA, 20 bp, synthetic construct
  source 1..20: mol_type = other DNA
gccccatcagcctgggctgt

SEQ ID NO: 281990 - DNA, 20 bp, synthetic construct
  source 1..20: mol_type = other DNA
ggccccatcagcctgggctg

SEQ ID NO: 281991 - DNA, 20 bp, synthetic construct
  source 1..20: mol_type = other DNA
aggccccatcagcctgggct

SEQ ID NO: 281992 - DNA, 20 bp, synthetic construct
  source 1..20: mol_type = other DNA
gaggccccatcagcctgggc

SEQ ID NO: 281993 - DNA, 20 bp, synthetic construct
  source 1..20: mol_type = other DNA
ggaggccccatcagcctggg

SEQ ID NO: 281994 - DNA, 20 bp, synthetic construct
  source 1..20: mol_type = other DNA
tggaggccccatcagcctgg

SEQ ID NO: 281995 - DNA, 20 bp, synthetic construct
  source 1..20: mol_type = other DNA
ctggaggccccatcagcctg

SEQ ID NO: 281996 - DNA, 20 bp, synthetic construct
  source 1..20: mol_type = other DNA
cctggaggccccatcagcct

SEQ ID NO: 281997 - DNA, 20 bp, synthetic construct
  source 1..20: mol_type = other DNA
ccctggaggccccatcagcc

SEQ ID NO: 281998 - DNA, 20 bp, synthetic construct
  source 1..20: mol_type = other DNA
gccctggaggccccatcagc

SEQ ID NO: 281999 - DNA, 20 bp, synthetic construct
  source 1..20: mol_type = other DNA
tgccctggaggccccatcag

SEQ ID NO: 282000 - DNA, 20 bp, synthetic construct
  source 1..20: mol_type = other DNA
ctgccctggaggccccatca

SEQ ID NO: 282001 - DNA, 20 bp, synthetic construct
  source 1..20: mol_type = other DNA
actgccctggaggccccatc

SEQ ID NO: 282002 - DNA, 20 bp, synthetic construct
  source 1..20: mol_type = other DNA
cactgccctggaggccccat

SEQ ID NO: 282003 - DNA, 20 bp, synthetic construct
  source 1..20: mol_type = other DNA
ccactgccctggaggcccca

SEQ ID NO: 282004 - DNA, 20 bp, synthetic construct
  source 1..20: mol_type = other DNA
accactgccctggaggcccc

SEQ ID NO: 282005 - DNA, 20 bp, synthetic construct
  source 1..20: mol_type = other DNA
aaccactgccctggaggccc

SEQ ID NO: 282006 - DNA, 20 bp, synthetic construct
  source 1..20: mol_type = other DNA
aaaccactgccctggaggcc

SEQ ID NO: 282007 - DNA, 20 bp, synthetic construct
  source 1..20: mol_type = other DNA
gaaaccactgccctggaggc

SEQ ID NO: 282008 - DNA, 20 bp, synthetic construct
  source 1..20: mol_type = other DNA
ggaaaccactgccctggagg

SEQ ID NO: 282009 - DNA, 20 bp, synthetic construct
  source 1..20: mol_type = other DNA
tggaaaccactgccctggag

SEQ ID NO: 282010 - DNA, 20 bp, synthetic construct
  source 1..20: mol_type = other DNA
gtggaaaccactgccctgga

SEQ ID NO: 282011 - DNA, 20 bp, synthetic construct
  source 1..20: mol_type = other DNA
ggtggaaaccactgccctgg

SEQ ID NO: 282012 - DNA, 20 bp, synthetic construct
  source 1..20: mol_type = other DNA
gggtggaaaccactgccctg

SEQ ID NO: 282013 - DNA, 20 bp, synthetic construct
  source 1..20: mol_type = other DNA
tgggtggaaaccactgccct

SEQ ID NO: 282014 - DNA, 20 bp, synthetic construct
  source 1..20: mol_type = other DNA
ctgggtggaaaccactgccc

SEQ ID NO: 282015 - DNA, 20 bp, synthetic construct
  source 1..20: mol_type = other DNA
gctgggtggaaaccactgcc

SEQ ID NO: 282016 - DNA, 20 bp, synthetic construct
  source 1..20: mol_type = other DNA
tgctgggtggaaaccactgc

SEQ ID NO: 282017 - DNA, 20 bp, synthetic construct
  source 1..20: mol_type = other DNA
atgctgggtggaaaccactg

SEQ ID NO: 282018 - DNA, 20 bp, synthetic construct
  source 1..20: mol_type = other DNA
aatgctgggtggaaaccact

SEQ ID NO: 282019 - DNA, 20 bp, synthetic construct
  source 1..20: mol_type = other DNA
gaatgctgggtggaaaccac

SEQ ID NO: 282020 - DNA, 20 bp, synthetic construct
  source 1..20: mol_type = other DNA
agaatgctgggtggaaacca

SEQ ID NO: 282021 - DNA, 20 bp, synthetic construct
  source 1..20: mol_type = other DNA
gagaatgctgggtggaaacc

SEQ ID NO: 282022 - DNA, 20 bp, synthetic construct
  source 1..20: mol_type = other DNA
tgagaatgctgggtggaaac

SEQ ID NO: 282023 - DNA, 20 bp, synthetic construct
  source 1..20: mol_type = other DNA
ttgagaatgctgggtggaaa

SEQ ID NO: 282024 - DNA, 20 bp, synthetic construct
  source 1..20: mol_type = other DNA
tttgagaatgctgggtggaa

SEQ ID NO: 282025 - DNA, 20 bp, synthetic construct
  source 1..20: mol_type = other DNA
ttttgagaatgctgggtgga

SEQ ID NO: 282026 - DNA, 20 bp, synthetic construct
  source 1..20: mol_type = other DNA
cttttgagaatgctgggtgg

SEQ ID NO: 282027 - DNA, 20 bp, synthetic construct
  source 1..20: mol_type = other DNA
tcttttgagaatgctgggtg

SEQ ID NO: 282028 - DNA, 20 bp, synthetic construct
  source 1..20: mol_type = other DNA
ctcttttgagaatgctgggt

SEQ ID NO: 282029 - DNA, 20 bp, synthetic construct
  source 1..20: mol_type = other DNA
gctcttttgagaatgctggg

SEQ ID NO: 282030 - DNA, 20 bp, synthetic construct
  source 1..20: mol_type = other DNA
ggctcttttgagaatgctgg

SEQ ID NO: 282031 - DNA, 20 bp, synthetic construct
  source 1..20: mol_type = other DNA
tggctcttttgagaatgctg

SEQ ID NO: 282032 - DNA, 20 bp, synthetic construct
  source 1..20: mol_type = other DNA
gtggctcttttgagaatgct

SEQ ID NO: 282033 - DNA, 20 bp, synthetic construct
  source 1..20: mol_type = other DNA
agtggctcttttgagaatgc

SEQ ID NO: 282034 - DNA, 20 bp, synthetic construct
  source 1..20: mol_type = other DNA
cagtggctcttttgagaatg

SEQ ID NO: 282035 - DNA, 20 bp, synthetic construct
  source 1..20: mol_type = other DNA
tcagtggctcttttgagaat

SEQ ID NO: 282036 - DNA, 20 bp, synthetic construct
  source 1..20: mol_type = other DNA
ctcagtggctcttttgagaa

SEQ ID NO: 282037 - DNA, 20 bp, synthetic construct
  source 1..20: mol_type = other DNA
cctcagtggctcttttgaga

SEQ ID NO: 282038 - DNA, 20 bp, synthetic construct
  source 1..20: mol_type = other DNA
acctcagtggctcttttgag

SEQ ID NO: 282039 - DNA, 20 bp, synthetic construct
  source 1..20: mol_type = other DNA
gacctcagtggctcttttga

SEQ ID NO: 282040 - DNA, 20 bp, synthetic construct
  source 1..20: mol_type = other DNA
agacctcagtggctcttttg

SEQ ID NO: 282041 - DNA, 20 bp, synthetic construct
  source 1..20: mol_type = other DNA
gagacctcagtggctctttt

SEQ ID NO: 282042 - DNA, 20 bp, synthetic construct
  source 1..20: mol_type = other DNA
tgagacctcagtggctcttt

SEQ ID NO: 282043 - DNA, 20 bp, synthetic construct
  source 1..20: mol_type = other DNA
ctgagacctcagtggctctt

SEQ ID NO: 282044 - DNA, 20 bp, synthetic construct
  source 1..20: mol_type = other DNA
actgagacctcagtggctct

SEQ ID NO: 282045 - DNA, 20 bp, synthetic construct
  source 1..20: mol_type = other DNA
cactgagacctcagtggctc

SEQ ID NO: 282046 - DNA, 20 bp, synthetic construct
  source 1..20: mol_type = other DNA
gcactgagacctcagtggct

SEQ ID NO: 282047 - DNA, 20 bp, synthetic construct
  source 1..20: mol_type = other DNA
ggcactgagacctcagtggc

SEQ ID NO: 282048 - DNA, 20 bp, synthetic construct
  source 1..20: mol_type = other DNA
tggcactgagacctcagtgg

SEQ ID NO: 282049 - DNA, 20 bp, synthetic construct
  source 1..20: mol_type = other DNA
atggcactgagacctcagtg

SEQ ID NO: 282050 - DNA, 20 bp, synthetic construct
  source 1..20: mol_type = other DNA
aatggcactgagacctcagt

SEQ ID NO: 282051 - DNA, 20 bp, synthetic construct
  source 1..20: mol_type = other DNA
aaatggcactgagacctcag

SEQ ID NO: 282052 - DNA, 20 bp, synthetic construct
  source 1..20: mol_type = other DNA
aaaatggcactgagacctca

SEQ ID NO: 282053 - DNA, 20 bp, synthetic construct
  source 1..20: mol_type = other DNA
gaaaatggcactgagacctc

SEQ ID NO: 282054 - DNA, 20 bp, synthetic construct
  source 1..20: mol_type = other DNA
tgaaaatggcactgagacct

SEQ ID NO: 282055 - DNA, 20 bp, synthetic construct
  source 1..20: mol_type = other DNA
ttgaaaatggcactgagacc

SEQ ID NO: 282056 - DNA, 20 bp, synthetic construct
  source 1..20: mol_type = other DNA
cttgaaaatggcactgagac

SEQ ID NO: 282057 - DNA, 20 bp, synthetic construct
  source 1..20: mol_type = other DNA
tcttgaaaatggcactgaga

SEQ ID NO: 282058 - DNA, 20 bp, synthetic construct
  source 1..20: mol_type = other DNA
atcttgaaaatggcactgag

SEQ ID NO: 282059 - DNA, 20 bp, synthetic construct
  source 1..20: mol_type = other DNA
aatcttgaaaatggcactga

SEQ ID NO: 282060 - DNA, 20 bp, synthetic construct
  source 1..20: mol_type = other DNA
aaatcttgaaaatggcactg

SEQ ID NO: 282061 - DNA, 20 bp, synthetic construct
  source 1..20: mol_type = other DNA
gaaatcttgaaaatggcact

SEQ ID NO: 282062 - DNA, 20 bp, synthetic construct
  source 1..20: mol_type = other DNA
cgaaatcttgaaaatggcac

SEQ ID NO: 282063 - DNA, 20 bp, synthetic construct
  source 1..20: mol_type = other DNA
ccgaaatcttgaaaatggca

SEQ ID NO: 282064 - DNA, 20 bp, synthetic construct
  source 1..20: mol_type = other DNA
tccgaaatcttgaaaatggc

SEQ ID NO: 282065 - DNA, 20 bp, synthetic construct
  source 1..20: mol_type = other DNA
ttccgaaatcttgaaaatgg

SEQ ID NO: 282066 - DNA, 20 bp, synthetic construct
  source 1..20: mol_type = other DNA
cttccgaaatcttgaaaatg

SEQ ID NO: 282067 - DNA, 20 bp, synthetic construct
  source 1..20: mol_type = other DNA
gcttccgaaatcttgaaaat

SEQ ID NO: 282068 - DNA, 20 bp, synthetic construct
  source 1..20: mol_type = other DNA
cgcttccgaaatcttgaaaa

SEQ ID NO: 282069 - DNA, 20 bp, synthetic construct
  source 1..20: mol_type = other DNA
ccgcttccgaaatcttgaaa

SEQ ID NO: 282070 - DNA, 20 bp, synthetic construct
  source 1..20: mol_type = other DNA
gccgcttccgaaatcttgaa

SEQ ID NO: 282071 - DNA, 20 bp, synthetic construct
  source 1..20: mol_type = other DNA
ggccgcttccgaaatcttga

SEQ ID NO: 282072 - DNA, 20 bp, synthetic construct
  source 1..20: mol_type = other DNA
aggccgcttccgaaatcttg

SEQ ID NO: 282073 - DNA, 20 bp, synthetic construct
  source 1..20: mol_type = other DNA
caggccgcttccgaaatctt

SEQ ID NO: 282074 - DNA, 20 bp, synthetic construct
  source 1..20: mol_type = other DNA
ccaggccgcttccgaaatct

SEQ ID NO: 282075 - DNA, 20 bp, synthetic construct
  source 1..20: mol_type = other DNA
cccaggccgcttccgaaatc

SEQ ID NO: 282076 - DNA, 20 bp, synthetic construct
  source 1..20: mol_type = other DNA
gcccaggccgcttccgaaat

SEQ ID NO: 282077 - DNA, 20 bp, synthetic construct
  source 1..20: mol_type = other DNA
tgcccaggccgcttccgaaa

SEQ ID NO: 282078 - DNA, 20 bp, synthetic construct
  source 1..20: mol_type = other DNA
gtgcccaggccgcttccgaa

SEQ ID NO: 282079 - DNA, 20 bp, synthetic construct
  source 1..20: mol_type = other DNA
cgtgcccaggccgcttccga

SEQ ID NO: 282080 - DNA, 20 bp, synthetic construct
  source 1..20: mol_type = other DNA
ccgtgcccaggccgcttccg

SEQ ID NO: 282081 - DNA, 20 bp, synthetic construct
  source 1..20: mol_type = other DNA
gccgtgcccaggccgcttcc

SEQ ID NO: 282082 - DNA, 20 bp, synthetic construct
  source 1..20: mol_type = other DNA
agccgtgcccaggccgcttc

SEQ ID NO: 282083 - DNA, 20 bp, synthetic construct
  source 1..20: mol_type = other DNA
cagccgtgcccaggccgctt

SEQ ID NO: 282084 - DNA, 20 bp, synthetic construct
  source 1..20: mol_type = other DNA
ccagccgtgcccaggccgct

SEQ ID NO: 282085 - DNA, 20 bp, synthetic construct
  source 1..20: mol_type = other DNA
accagccgtgcccaggccgc

SEQ ID NO: 282086 - DNA, 20 bp, synthetic construct
  source 1..20: mol_type = other DNA
gaccagccgtgcccaggccg

SEQ ID NO: 282087 - DNA, 20 bp, synthetic construct
  source 1..20: mol_type = other DNA
ggaccagccgtgcccaggcc

SEQ ID NO: 282088 - DNA, 20 bp, synthetic construct
  source 1..20: mol_type = other DNA
aggaccagccgtgcccaggc

SEQ ID NO: 282089 - DNA, 20 bp, synthetic construct
  source 1..20: mol_type = other DNA
aaggaccagccgtgcccagg

SEQ ID NO: 282090 - DNA, 20 bp, synthetic construct
  source 1..20: mol_type = other DNA
gaaggaccagccgtgcccag

SEQ ID NO: 282091 - DNA, 20 bp, synthetic construct
  source 1..20: mol_type = other DNA
tgaaggaccagccgtgccca

SEQ ID NO: 282092 - DNA, 20 bp, synthetic construct
  source 1..20: mol_type = other DNA
gtgaaggaccagccgtgccc

SEQ ID NO: 282093 - DNA, 20 bp, synthetic construct
  source 1..20: mol_type = other DNA
agtgaaggaccagccgtgcc

SEQ ID NO: 282094 - DNA, 20 bp, synthetic construct
  source 1..20: mol_type = other DNA
cagtgaaggaccagccgtgc

SEQ ID NO: 282095 - DNA, 20 bp, synthetic construct
  source 1..20: mol_type = other DNA
ccagtgaaggaccagccgtg

SEQ ID NO: 282096 - DNA, 20 bp, synthetic construct
  source 1..20: mol_type = other DNA
cccagtgaaggaccagccgt

SEQ ID NO: 282097 - DNA, 20 bp, synthetic construct
  source 1..20: mol_type = other DNA
tcccagtgaaggaccagccg

SEQ ID NO: 282098 - DNA, 20 bp, synthetic construct
  source 1..20: mol_type = other DNA
atcccagtgaaggaccagcc

SEQ ID NO: 282099 - DNA, 20 bp, synthetic construct
  source 1..20: mol_type = other DNA
gatcccagtgaaggaccagc

SEQ ID NO: 282100 - DNA, 20 bp, synthetic construct
  source 1..20: mol_type = other DNA
tgatcccagtgaaggaccag

SEQ ID NO: 282101 - DNA, 20 bp, synthetic construct
  source 1..20: mol_type = other DNA
gtgatcccagtgaaggacca

SEQ ID NO: 282102 - DNA, 20 bp, synthetic construct
  source 1..20: mol_type = other DNA
ggtgatcccagtgaaggacc

SEQ ID NO: 282103 - DNA, 20 bp, synthetic construct
  source 1..20: mol_type = other DNA
tggtgatcccagtgaaggac

SEQ ID NO: 282104 - DNA, 20 bp, synthetic construct
  source 1..20: mol_type = other DNA
gtggtgatcccagtgaagga

SEQ ID NO: 282105 - DNA, 20 bp, synthetic construct
  source 1..20: mol_type = other DNA
agtggtgatcccagtgaagg

SEQ ID NO: 282106 - DNA, 20 bp, synthetic construct
  source 1..20: mol_type = other DNA
aagtggtgatcccagtgaag

SEQ ID NO: 282107 - DNA, 20 bp, synthetic construct
  source 1..20: mol_type = other DNA
caagtggtgatcccagtgaa

SEQ ID NO: 282108 - DNA, 20 bp, synthetic construct
  source 1..20: mol_type = other DNA
ccaagtggtgatcccagtga

SEQ ID NO: 282109 - DNA, 20 bp, synthetic construct
  source 1..20: mol_type = other DNA
gccaagtggtgatcccagtg

SEQ ID NO: 282110 - DNA, 20 bp, synthetic construct
  source 1..20: mol_type = other DNA
tgccaagtggtgatcccagt

SEQ ID NO: 282111 - DNA, 20 bp, synthetic construct
  source 1..20: mol_type = other DNA
ttgccaagtggtgatcccag

SEQ ID NO: 282112 - DNA, 20 bp, synthetic construct
  source 1..20: mol_type = other DNA
attgccaagtggtgatccca

SEQ ID NO: 282113 - DNA, 20 bp, synthetic construct
  source 1..20: mol_type = other DNA
aattgccaagtggtgatccc

SEQ ID NO: 282114 - DNA, 20 bp, synthetic construct
  source 1..20: mol_type = other DNA
taattgccaagtggtgatcc

SEQ ID NO: 282115 - DNA, 20 bp, synthetic construct
  source 1..20: mol_type = other DNA
ataattgccaagtggtgatc

SEQ ID NO: 282116 - DNA, 20 bp, synthetic construct
  source 1..20: mol_type = other DNA
aataattgccaagtggtgat

SEQ ID NO: 282117 - DNA, 20 bp, synthetic construct
  source 1..20: mol_type = other DNA
aaataattgccaagtggtga

SEQ ID NO: 282118 - DNA, 20 bp, synthetic construct
  source 1..20: mol_type = other DNA
taaataattgccaagtggtg

SEQ ID NO: 282119 - DNA, 20 bp, synthetic construct
  source 1..20: mol_type = other DNA
gtaaataattgccaagtggt

SEQ ID NO: 282120 - DNA, 20 bp, synthetic construct
  source 1..20: mol_type = other DNA
tgtaaataattgccaagtgg

SEQ ID NO: 282121 - DNA, 20 bp, synthetic construct
  source 1..20: mol_type = other DNA
gtgtaaataattgccaagtg

SEQ ID NO: 282122 - DNA, 20 bp, synthetic construct
  source 1..20: mol_type = other DNA
ggtgtaaataattgccaagt

SEQ ID NO: 282123 - DNA, 20 bp, synthetic construct
  source 1..20: mol_type = other DNA
aggtgtaaataattgccaag

SEQ ID NO: 282124 - DNA, 20 bp, synthetic construct
  source 1..20: mol_type = other DNA
caggtgtaaataattgccaa

SEQ ID NO: 282125 - DNA, 20 bp, synthetic construct
  source 1..20: mol_type = other DNA
tcaggtgtaaataattgcca

SEQ ID NO: 282126 - DNA, 20 bp, synthetic construct
  source 1..20: mol_type = other DNA
ctcaggtgtaaataattgcc

SEQ ID NO: 282127 - DNA, 20 bp, synthetic construct
  source 1..20: mol_type = other DNA
tctcaggtgtaaataattgc

SEQ ID NO: 282128 - DNA, 20 bp, synthetic construct
  source 1..20: mol_type = other DNA
gtctcaggtgtaaataattg

SEQ ID NO: 282129 - DNA, 20 bp, synthetic construct
  source 1..20: mol_type = other DNA
cgtctcaggtgtaaataatt

SEQ ID NO: 282130 - DNA, 20 bp, synthetic construct
  source 1..20: mol_type = other DNA
tcgtctcaggtgtaaataat

SEQ ID NO: 282131 - DNA, 20 bp, synthetic construct
  source 1..20: mol_type = other DNA
ttcgtctcaggtgtaaataa

SEQ ID NO: 282132 - DNA, 20 bp, synthetic construct
  source 1..20: mol_type = other DNA
attcgtctcaggtgtaaata

SEQ ID NO: 282133 - DNA, 20 bp, synthetic construct
  source 1..20: mol_type = other DNA
tattcgtctcaggtgtaaat

SEQ ID NO: 282134 - DNA, 20 bp, synthetic construct
  source 1..20: mol_type = other DNA
ttattcgtctcaggtgtaaa

SEQ ID NO: 282135 - DNA, 20 bp, synthetic construct
  source 1..20: mol_type = other DNA
tttattcgtctcaggtgtaa

SEQ ID NO: 282136 - DNA, 20 bp, synthetic construct
  source 1..20: mol_type = other DNA
ttttattcgtctcaggtgta

SEQ ID NO: 282137 - DNA, 20 bp, synthetic construct
  source 1..20: mol_type = other DNA
tttttattcgtctcaggtgt

SEQ ID NO: 282138 - DNA, 20 bp, synthetic construct
  source 1..20: mol_type = other DNA
gtttttattcgtctcaggtg

SEQ ID NO: 282139 - DNA, 20 bp, synthetic construct
  source 1..20: mol_type = other DNA
ggtttttattcgtctcaggt

SEQ ID NO: 282140 - DNA, 20 bp, synthetic construct
  source 1..20: mol_type = other DNA
tggtttttattcgtctcagg

SEQ ID NO: 282141 - DNA, 20 bp, synthetic construct
  source 1..20: mol_type = other DNA
ctggtttttattcgtctcag

SEQ ID NO: 282142 - DNA, 20 bp, synthetic construct
  source 1..20: mol_type = other DNA
tctggtttttattcgtctca

SEQ ID NO: 282143 - DNA, 20 bp, synthetic construct
  source 1..20: mol_type = other DNA
ctctggtttttattcgtctc

SEQ ID NO: 282144 - DNA, 20 bp, synthetic construct
  source 1..20: mol_type = other DNA
actctggtttttattcgtct

SEQ ID NO: 282145 - DNA, 20 bp, synthetic construct
  source 1..20: mol_type = other DNA
cactctggtttttattcgtc

SEQ ID NO: 282146 - DNA, 20 bp, synthetic construct
  source 1..20: mol_type = other DNA
gcactctggtttttattcgt

SEQ ID NO: 282147 - DNA, 20 bp, synthetic construct
  source 1..20: mol_type = other DNA
agcactctggtttttattcg

SEQ ID NO: 282148 - DNA, 20 bp, synthetic construct
  source 1..20: mol_type = other DNA
cagcactctggtttttattc

SEQ ID NO: 282149 - DNA, 20 bp, synthetic construct
  source 1..20: mol_type = other DNA
tcagcactctggtttttatt

SEQ ID NO: 282150 - DNA, 20 bp, synthetic construct
  source 1..20: mol_type = other DNA
ctcagcactctggtttttat

SEQ ID NO: 282151 - DNA, 20 bp, synthetic construct
  source 1..20: mol_type = other DNA
tctcagcactctggttttta

SEQ ID NO: 282152 - DNA, 20 bp, synthetic construct
  source 1..20: mol_type = other DNA
atctcagcactctggttttt

SEQ ID NO: 282153 - DNA, 20 bp, synthetic construct
  source 1..20: mol_type = other DNA
aatctcagcactctggtttt

SEQ ID NO: 282154 - DNA, 20 bp, synthetic construct
  source 1..20: mol_type = other DNA
taatctcagcactctggttt

SEQ ID NO: 282155 - DNA, 20 bp, synthetic construct
  source 1..20: mol_type = other DNA
gtaatctcagcactctggtt

SEQ ID NO: 282156 - DNA, 20 bp, synthetic construct
  source 1..20: mol_type = other DNA
tgtaatctcagcactctggt

SEQ ID NO: 282157 - DNA, 20 bp, synthetic construct
  source 1..20: mol_type = other DNA
ctgtaatctcagcactctgg

SEQ ID NO: 282158 - DNA, 20 bp, synthetic construct
  source 1..20: mol_type = other DNA
cctgtaatctcagcactctg

SEQ ID NO: 282159 - DNA, 20 bp, synthetic construct
  source 1..20: mol_type = other DNA
gcctgtaatctcagcactct

SEQ ID NO: 282160 - DNA, 20 bp, synthetic construct
  source 1..20: mol_type = other DNA
tgcctgtaatctcagcactc

SEQ ID NO: 282161 - DNA, 20 bp, synthetic construct
  source 1..20: mol_type = other DNA
atgcctgtaatctcagcact

SEQ ID NO: 282162 - DNA, 20 bp, synthetic construct
  source 1..20: mol_type = other DNA
catgcctgtaatctcagcac

SEQ ID NO: 282163 - DNA, 20 bp, synthetic construct
  source 1..20: mol_type = other DNA
ccatgcctgtaatctcagca

SEQ ID NO: 282164 - DNA, 20 bp, synthetic construct
  source 1..20: mol_type = other DNA
accatgcctgtaatctcagc

SEQ ID NO: 282165 - DNA, 20 bp, synthetic construct
  source 1..20: mol_type = other DNA
caccatgcctgtaatctcag

SEQ ID NO: 282166 - DNA, 20 bp, synthetic construct
  source 1..20: mol_type = other DNA
ccaccatgcctgtaatctca

SEQ ID NO: 282167 - DNA, 20 bp, synthetic construct
  source 1..20: mol_type = other DNA
gccaccatgcctgtaatctc

SEQ ID NO: 282168 - DNA, 20 bp, synthetic construct
  source 1..20: mol_type = other DNA
agccaccatgcctgtaatct

SEQ ID NO: 282169 - DNA, 20 bp, synthetic construct
  source 1..20: mol_type = other DNA
aagccaccatgcctgtaatc

SEQ ID NO: 282170 - DNA, 20 bp, synthetic construct
  source 1..20: mol_type = other DNA
taagccaccatgcctgtaat

SEQ ID NO: 282171 - DNA, 20 bp, synthetic construct
  source 1..20: mol_type = other DNA
gtaagccaccatgcctgtaa

SEQ ID NO: 282172 - DNA, 20 bp, synthetic construct
  source 1..20: mol_type = other DNA
cgtaagccaccatgcctgta

SEQ ID NO: 282173 - DNA, 20 bp, synthetic construct
  source 1..20: mol_type = other DNA
gcgtaagccaccatgcctgt

SEQ ID NO: 282174 - DNA, 20 bp, synthetic construct
  source 1..20: mol_type = other DNA
agcgtaagccaccatgcctg

SEQ ID NO: 282175 - DNA, 20 bp, synthetic construct
  source 1..20: mol_type = other DNA
aagcgtaagccaccatgcct

SEQ ID NO: 282176 - DNA, 20 bp, synthetic construct
  source 1..20: mol_type = other DNA
caagcgtaagccaccatgcc

SEQ ID NO: 282177 - DNA, 20 bp, synthetic construct
  source 1..20: mol_type = other DNA
acaagcgtaagccaccatgc

SEQ ID NO: 282178 - DNA, 20 bp, synthetic construct
  source 1..20: mol_type = other DNA
tacaagcgtaagccaccatg

SEQ ID NO: 282179 - DNA, 20 bp, synthetic construct
  source 1..20: mol_type = other DNA
ttacaagcgtaagccaccat

SEQ ID NO: 282180 - DNA, 20 bp, synthetic construct
  source 1..20: mol_type = other DNA
attacaagcgtaagccacca

SEQ ID NO: 282181 - DNA, 20 bp, synthetic construct
  source 1..20: mol_type = other DNA
gattacaagcgtaagccacc

SEQ ID NO: 282182 - DNA, 20 bp, synthetic construct
  source 1..20: mol_type = other DNA
cgattacaagcgtaagccac

SEQ ID NO: 282183 - DNA, 20 bp, synthetic construct
  source 1..20: mol_type = other DNA
ccgattacaagcgtaagcca

SEQ ID NO: 282184 - DNA, 20 bp, synthetic construct
  source 1..20: mol_type = other DNA
gccgattacaagcgtaagcc

SEQ ID NO: 282185 - DNA, 20 bp, synthetic construct
  source 1..20: mol_type = other DNA
agccgattacaagcgtaagc

SEQ ID NO: 282186 - DNA, 20 bp, synthetic construct
  source 1..20: mol_type = other DNA
aagccgattacaagcgtaag

SEQ ID NO: 282187 - DNA, 20 bp, synthetic construct
  source 1..20: mol_type = other DNA
aaagccgattacaagcgtaa

SEQ ID NO: 282188 - DNA, 20 bp, synthetic construct
  source 1..20: mol_type = other DNA
caaagccgattacaagcgta

SEQ ID NO: 282189 - DNA, 20 bp, synthetic construct
  source 1..20: mol_type = other DNA
ccaaagccgattacaagcgt

SEQ ID NO: 282190 - DNA, 20 bp, synthetic construct
  source 1..20: mol_type = other DNA
cccaaagccgattacaagcg

SEQ ID NO: 282191 - DNA, 20 bp, synthetic construct
  source 1..20: mol_type = other DNA
tcccaaagccgattacaagc

SEQ ID NO: 282192 - DNA, 20 bp, synthetic construct
  source 1..20: mol_type = other DNA
ttcccaaagccgattacaag

SEQ ID NO: 282193 - DNA, 20 bp, synthetic construct
  source 1..20: mol_type = other DNA
cttcccaaagccgattacaa

SEQ ID NO: 282194 - DNA, 20 bp, synthetic construct
  source 1..20: mol_type = other DNA
gcttcccaaagccgattaca

SEQ ID NO: 282195 - DNA, 20 bp, synthetic construct
  source 1..20: mol_type = other DNA
ggcttcccaaagccgattac

SEQ ID NO: 282196 - DNA, 20 bp, synthetic construct
  source 1..20: mol_type = other DNA
cggcttcccaaagccgatta

SEQ ID NO: 282197 - DNA, 20 bp, synthetic construct
  source 1..20: mol_type = other DNA
tcggcttcccaaagccgatt

SEQ ID NO: 282198 - DNA, 20 bp, synthetic construct
  source 1..20: mol_type = other DNA
ctcggcttcccaaagccgat

SEQ ID NO: 282199 - DNA, 20 bp, synthetic construct
  source 1..20: mol_type = other DNA
cctcggcttcccaaagccga

SEQ ID NO: 282200 - DNA, 20 bp, synthetic construct
  source 1..20: mol_type = other DNA
acctcggcttcccaaagccg

SEQ ID NO: 282201 - DNA, 20 bp, synthetic construct
  source 1..20: mol_type = other DNA
cacctcggcttcccaaagcc

SEQ ID NO: 282202 - DNA, 20 bp, synthetic construct
  source 1..20: mol_type = other DNA
ccacctcggcttcccaaagc

SEQ ID NO: 282203 - DNA, 20 bp, synthetic construct
  source 1..20: mol_type = other DNA
cccacctcggcttcccaaag

SEQ ID NO: 282204 - DNA, 20 bp, synthetic construct
  source 1..20: mol_type = other DNA
gcccacctcggcttcccaaa

SEQ ID NO: 282205 - DNA, 20 bp, synthetic construct
  source 1..20: mol_type = other DNA
agcccacctcggcttcccaa

SEQ ID NO: 282206 - DNA, 20 bp, synthetic construct
  source 1..20: mol_type = other DNA
cagcccacctcggcttccca

SEQ ID NO: 282207 - DNA, 20 bp, synthetic construct
  source 1..20: mol_type = other DNA
tcagcccacctcggcttccc

SEQ ID NO: 282208 - DNA, 20 bp, synthetic construct
  source 1..20: mol_type = other DNA
atcagcccacctcggcttcc

SEQ ID NO: 282209 - DNA, 20 bp, synthetic construct
  source 1..20: mol_type = other DNA
aatcagcccacctcggcttc

SEQ ID NO: 282210 - DNA, 20 bp, synthetic construct
  source 1..20: mol_type = other DNA
caatcagcccacctcggctt

SEQ ID NO: 282211 - DNA, 20 bp, synthetic construct
  source 1..20: mol_type = other DNA
gcaatcagcccacctcggct

SEQ ID NO: 282212 - DNA, 20 bp, synthetic construct
  source 1..20: mol_type = other DNA
agcaatcagcccacctcggc

SEQ ID NO: 282213 - DNA, 20 bp, synthetic construct
  source 1..20: mol_type = other DNA
aagcaatcagcccacctcgg

SEQ ID NO: 282214 - DNA, 20 bp, synthetic construct
  source 1..20: mol_type = other DNA
caagcaatcagcccacctcg

SEQ ID NO: 282215 - DNA, 20 bp, synthetic construct
  source 1..20: mol_type = other DNA
tcaagcaatcagcccacctc

SEQ ID NO: 282216 - DNA, 20 bp, synthetic construct
  source 1..20: mol_type = other DNA
ctcaagcaatcagcccacct

SEQ ID NO: 282217 - DNA, 20 bp, synthetic construct
  source 1..20: mol_type = other DNA
gctcaagcaatcagcccacc

SEQ ID NO: 282218 - DNA, 20 bp, synthetic construct
  source 1..20: mol_type = other DNA
ggctcaagcaatcagcccac

SEQ ID NO: 282219 - DNA, 20 bp, synthetic construct
  source 1..20: mol_type = other DNA
gggctcaagcaatcagccca

SEQ ID NO: 282220 - DNA, 20 bp, synthetic construct
  source 1..20: mol_type = other DNA
tgggctcaagcaatcagccc

SEQ ID NO: 282221 - DNA, 20 bp, synthetic construct
  source 1..20: mol_type = other DNA
ctgggctcaagcaatcagcc

SEQ ID NO: 282222 - DNA, 20 bp, synthetic construct
  source 1..20: mol_type = other DNA
cctgggctcaagcaatcagc

SEQ ID NO: 282223 - DNA, 20 bp, synthetic construct
  source 1..20: mol_type = other DNA
tcctgggctcaagcaatcag

SEQ ID NO: 282224 - DNA, 20 bp, synthetic construct
  source 1..20: mol_type = other DNA
ctcctgggctcaagcaatca

SEQ ID NO: 282225 - DNA, 20 bp, synthetic construct
  source 1..20: mol_type = other DNA
actcctgggctcaagcaatc

SEQ ID NO: 282226 - DNA, 20 bp, synthetic construct
  source 1..20: mol_type = other DNA
aactcctgggctcaagcaat

SEQ ID NO: 282227 - DNA, 20 bp, synthetic construct
  source 1..20: mol_type = other DNA
aaactcctgggctcaagcaa

SEQ ID NO: 282228 - DNA, 20 bp, synthetic construct
  source 1..20: mol_type = other DNA
gaaactcctgggctcaagca

SEQ ID NO: 282229 - DNA, 20 bp, synthetic construct
  source 1..20: mol_type = other DNA
tgaaactcctgggctcaagc

SEQ ID NO: 282230 - DNA, 20 bp, synthetic construct
  source 1..20: mol_type = other DNA
ttgaaactcctgggctcaag

SEQ ID NO: 282231 - DNA, 20 bp, synthetic construct
  source 1..20: mol_type = other DNA
tttgaaactcctgggctcaa

SEQ ID NO: 282232 - DNA, 20 bp, synthetic construct
  source 1..20: mol_type = other DNA
gtttgaaactcctgggctca

SEQ ID NO: 282233 - DNA, 20 bp, synthetic construct
  source 1..20: mol_type = other DNA
agtttgaaactcctgggctc

SEQ ID NO: 282234 - DNA, 20 bp, synthetic construct
  source 1..20: mol_type = other DNA
tagtttgaaactcctgggct

SEQ ID NO: 282235 - DNA, 20 bp, synthetic construct
  source 1..20: mol_type = other DNA
atagtttgaaactcctgggc

SEQ ID NO: 282236 - DNA, 20 bp, synthetic construct
  source 1..20: mol_type = other DNA
gatagtttgaaactcctggg

SEQ ID NO: 282237 - DNA, 20 bp, synthetic construct
  source 1..20: mol_type = other DNA
ggatagtttgaaactcctgg

SEQ ID NO: 282238 - DNA, 20 bp, synthetic construct
  source 1..20: mol_type = other DNA
aggatagtttgaaactcctg

SEQ ID NO: 282239 - DNA, 20 bp, synthetic construct
  source 1..20: mol_type = other DNA
caggatagtttgaaactcct

SEQ ID NO: 282240 - DNA, 20 bp, synthetic construct
  source 1..20: mol_type = other DNA
ccaggatagtttgaaactcc

SEQ ID NO: 282241 - DNA, 20 bp, synthetic construct
  source 1..20: mol_type = other DNA
tccaggatagtttgaaactc

SEQ ID NO: 282242 - DNA, 20 bp, synthetic construct
  source 1..20: mol_type = other DNA
gtccaggatagtttgaaact

SEQ ID NO: 282243 - DNA, 20 bp, synthetic construct
  source 1..20: mol_type = other DNA
tgtccaggatagtttgaaac

SEQ ID NO: 282244 - DNA, 20 bp, synthetic construct
  source 1..20: mol_type = other DNA
ttgtccaggatagtttgaaa

SEQ ID NO: 282245 - DNA, 20 bp, synthetic construct
  source 1..20: mol_type = other DNA
gttgtccaggatagtttgaa

SEQ ID NO: 282246 - DNA, 20 bp, synthetic construct
  source 1..20: mol_type = other DNA
tgttgtccaggatagtttga

SEQ ID NO: 282247 - DNA, 20 bp, synthetic construct
  source 1..20: mol_type = other DNA
atgttgtccaggatagtttg

SEQ ID NO: 282248 - DNA, 20 bp, synthetic construct
  source 1..20: mol_type = other DNA
tatgttgtccaggatagttt

SEQ ID NO: 282249 - DNA, 20 bp, synthetic construct
  source 1..20: mol_type = other DNA
ctatgttgtccaggatagtt

SEQ ID NO: 282250 - DNA, 20 bp, synthetic construct
  source 1..20: mol_type = other DNA
gctatgttgtccaggatagt

SEQ ID NO: 282251 - DNA, 20 bp, synthetic construct
  source 1..20: mol_type = other DNA
tgctatgttgtccaggatag

SEQ ID NO: 282252 - DNA, 20 bp, synthetic construct
  source 1..20: mol_type = other DNA
atgctatgttgtccaggata

SEQ ID NO: 282253 - DNA, 20 bp, synthetic construct
  source 1..20: mol_type = other DNA
catgctatgttgtccaggat

SEQ ID NO: 282254 - DNA, 20 bp, synthetic construct
  source 1..20: mol_type = other DNA
tcatgctatgttgtccagga

SEQ ID NO: 282255 - DNA, 20 bp, synthetic construct
  source 1..20: mol_type = other DNA
gtcatgctatgttgtccagg

SEQ ID NO: 282256 - DNA, 20 bp, synthetic construct
  source 1..20: mol_type = other DNA
ggtcatgctatgttgtccag

SEQ ID NO: 282257 - DNA, 20 bp, synthetic construct
  source 1..20: mol_type = other DNA
aggtcatgctatgttgtcca

SEQ ID NO: 282258 - DNA, 20 bp, synthetic construct
  source 1..20: mol_type = other DNA
gaggtcatgctatgttgtcc

SEQ ID NO: 282259 - DNA, 20 bp, synthetic construct
  source 1..20: mol_type = other DNA
cgaggtcatgctatgttgtc

SEQ ID NO: 282260 - DNA, 20 bp, synthetic construct
  source 1..20: mol_type = other DNA
acgaggtcatgctatgttgt

SEQ ID NO: 282261 - DNA, 20 bp, synthetic construct
  source 1..20: mol_type = other DNA
gacgaggtcatgctatgttg

SEQ ID NO: 282262 - DNA, 20 bp, synthetic construct
  source 1..20: mol_type = other DNA
agacgaggtcatgctatgtt

SEQ ID NO: 282263 - DNA, 20 bp, synthetic construct
  source 1..20: mol_type = other DNA
gagacgaggtcatgctatgt

SEQ ID NO: 282264 - DNA, 20 bp, synthetic construct
  source 1..20: mol_type = other DNA
agagacgaggtcatgctatg

SEQ ID NO: 282265 - DNA, 20 bp, synthetic construct
  source 1..20: mol_type = other DNA
tagagacgaggtcatgctat

SEQ ID NO: 282266 - DNA, 20 bp, synthetic construct
  source 1..20: mol_type = other DNA
gtagagacgaggtcatgcta

SEQ ID NO: 282267 - DNA, 20 bp, synthetic construct
  source 1..20: mol_type = other DNA
tgtagagacgaggtcatgct

SEQ ID NO: 282268 - DNA, 20 bp, synthetic construct
  source 1..20: mol_type = other DNA
ttgtagagacgaggtcatgc

SEQ ID NO: 282269 - DNA, 20 bp, synthetic construct
  source 1..20: mol_type = other DNA
tttgtagagacgaggtcatg

SEQ ID NO: 282270 - DNA, 20 bp, synthetic construct
  source 1..20: mol_type = other DNA
ttttgtagagacgaggtcat

SEQ ID NO: 282271 - DNA, 20 bp, synthetic construct
  source 1..20: mol_type = other DNA
tttttgtagagacgaggtca

SEQ ID NO: 282272 - DNA, 20 bp, synthetic construct
  source 1..20: mol_type = other DNA
ttttttgtagagacgaggtc

SEQ ID NO: 282273 - DNA, 20 bp, synthetic construct
  source 1..20: mol_type = other DNA
attttttgtagagacgaggt

SEQ ID NO: 282274 - DNA, 20 bp, synthetic construct
  source 1..20: mol_type = other DNA
tattttttgtagagacgagg

SEQ ID NO: 282275 - DNA, 20 bp, synthetic construct
  source 1..20: mol_type = other DNA
gtattttttgtagagacgag

SEQ ID NO: 282276 - DNA, 20 bp, synthetic construct
  source 1..20: mol_type = other DNA
tgtattttttgtagagacga

SEQ ID NO: 282277 - DNA, 20 bp, synthetic construct
  source 1..20: mol_type = other DNA
ttgtattttttgtagagacg

SEQ ID NO: 282278 - DNA, 20 bp, synthetic construct
  source 1..20: mol_type = other DNA
tttgtattttttgtagagac

SEQ ID NO: 282279 - DNA, 20 bp, synthetic construct
  source 1..20: mol_type = other DNA
ttttgtattttttgtagaga

SEQ ID NO: 282280 - DNA, 20 bp, synthetic construct
  source 1..20: mol_type = other DNA
tttttgtattttttgtagag

SEQ ID NO: 282281 - DNA, 20 bp, synthetic construct
  source 1..20: mol_type = other DNA
ttttttgtattttttgtaga

SEQ ID NO: 282282 - DNA, 20 bp, synthetic construct
  source 1..20: mol_type = other DNA
attttttgtattttttgtag

SEQ ID NO: 282283 - DNA, 20 bp, synthetic construct
  source 1..20: mol_type = other DNA
aattttttgtattttttgta

SEQ ID NO: 282284 - DNA, 20 bp, synthetic construct
  source 1..20: mol_type = other DNA
aaattttttgtattttttgt

SEQ ID NO: 282285 - DNA, 20 bp, synthetic construct
  source 1..20: mol_type = other DNA
caaattttttgtattttttg

SEQ ID NO: 282286 - DNA, 20 bp, synthetic construct
  source 1..20: mol_type = other DNA
gcaaattttttgtatttttt

SEQ ID NO: 282287 - DNA, 20 bp, synthetic construct
  source 1..20: mol_type = other DNA
ggcaaattttttgtattttt

SEQ ID NO: 282288 - DNA, 20 bp, synthetic construct
  source 1..20: mol_type = other DNA
tggcaaattttttgtatttt

SEQ ID NO: 282289 - DNA, 20 bp, synthetic construct
  source 1..20: mol_type = other DNA
ctggcaaattttttgtattt

SEQ ID NO: 282290 - DNA, 20 bp, synthetic construct
  source 1..20: mol_type = other DNA
cctggcaaattttttgtatt

SEQ ID NO: 282291 - DNA, 20 bp, synthetic construct
  source 1..20: mol_type = other DNA
acctggcaaattttttgtat

SEQ ID NO: 282292 - DNA, 20 bp, synthetic construct
  source 1..20: mol_type = other DNA
cacctggcaaattttttgta

SEQ ID NO: 282293 - DNA, 20 bp, synthetic construct
  source 1..20: mol_type = other DNA
acacctggcaaattttttgt

SEQ ID NO: 282294 - DNA, 20 bp, synthetic construct
  source 1..20: mol_type = other DNA
cacacctggcaaattttttg

SEQ ID NO: 282295 - DNA, 20 bp, synthetic construct
  source 1..20: mol_type = other DNA
ccacacctggcaaatttttt

SEQ ID NO: 282296 - DNA, 20 bp, synthetic construct
  source 1..20: mol_type = other DNA
accacacctggcaaattttt

SEQ ID NO: 282297 - DNA, 20 bp, synthetic construct
  source 1..20: mol_type = other DNA
caccacacctggcaaatttt

SEQ ID NO: 282298 - DNA, 20 bp, synthetic construct
  source 1..20: mol_type = other DNA
ccaccacacctggcaaattt

SEQ ID NO: 282299 - DNA, 20 bp, synthetic construct
  source 1..20: mol_type = other DNA
gccaccacacctggcaaatt

SEQ ID NO: 282300 - DNA, 20 bp, synthetic construct
  source 1..20: mol_type = other DNA
tgccaccacacctggcaaat

SEQ ID NO: 282301 - DNA, 20 bp, synthetic construct
  source 1..20: mol_type = other DNA
atgccaccacacctggcaaa

SEQ ID NO: 282302 - DNA, 20 bp, synthetic construct
  source 1..20: mol_type = other DNA
catgccaccacacctggcaa

SEQ ID NO: 282303 - DNA, 20 bp, synthetic construct
  source 1..20: mol_type = other DNA
acatgccaccacacctggca

SEQ ID NO: 282304 - DNA, 20 bp, synthetic construct
  source 1..20: mol_type = other DNA
cacatgccaccacacctggc

SEQ ID NO: 282305 - DNA, 20 bp, synthetic construct
  source 1..20: mol_type = other DNA
gcacatgccaccacacctgg

SEQ ID NO: 282306 - DNA, 20 bp, synthetic construct
  source 1..20: mol_type = other DNA
ggcacatgccaccacacctg

SEQ ID NO: 282307 - DNA, 20 bp, synthetic construct
  source 1..20: mol_type = other DNA
aggcacatgccaccacacct

SEQ ID NO: 282308 - DNA, 20 bp, synthetic construct
  source 1..20: mol_type = other DNA
caggcacatgccaccacacc

SEQ ID NO: 282309 - DNA, 20 bp, synthetic construct
  source 1..20: mol_type = other DNA
acaggcacatgccaccacac

SEQ ID NO: 282310 - DNA, 20 bp, synthetic construct
  source 1..20: mol_type = other DNA
cacaggcacatgccaccaca

SEQ ID NO: 282311 - DNA, 20 bp, synthetic construct
  source 1..20: mol_type = other DNA
ccacaggcacatgccaccac

SEQ ID NO: 282312 - DNA, 20 bp, synthetic construct
  source 1..20: mol_type = other DNA
accacaggcacatgccacca

SEQ ID NO: 282313 - DNA, 20 bp, synthetic construct
  source 1..20: mol_type = other DNA
gaccacaggcacatgccacc

SEQ ID NO: 282314 - DNA, 20 bp, synthetic construct
  source 1..20: mol_type = other DNA
ggaccacaggcacatgccac

SEQ ID NO: 282315 - DNA, 20 bp, synthetic construct
  source 1..20: mol_type = other DNA
gggaccacaggcacatgcca

SEQ ID NO: 282316 - DNA, 20 bp, synthetic construct
  source 1..20: mol_type = other DNA
tgggaccacaggcacatgcc

SEQ ID NO: 282317 - DNA, 20 bp, synthetic construct
  source 1..20: mol_type = other DNA
ctgggaccacaggcacatgc

SEQ ID NO: 282318 - DNA, 20 bp, synthetic construct
  source 1..20: mol_type = other DNA
gctgggaccacaggcacatg

SEQ ID NO: 282319 - DNA, 20 bp, synthetic construct
  source 1..20: mol_type = other DNA
agctgggaccacaggcacat

SEQ ID NO: 282320 - DNA, 20 bp, synthetic construct
  source 1..20: mol_type = other DNA
tagctgggaccacaggcaca

SEQ ID NO: 282321 - DNA, 20 bp, synthetic construct
  source 1..20: mol_type = other DNA
gtagctgggaccacaggcac

SEQ ID NO: 282322 - DNA, 20 bp, synthetic construct
  source 1..20: mol_type = other DNA
agtagctgggaccacaggca

SEQ ID NO: 282323 - DNA, 20 bp, synthetic construct
  source 1..20: mol_type = other DNA
aagtagctgggaccacaggc

SEQ ID NO: 282324 - DNA, 20 bp, synthetic construct
  source 1..20: mol_type = other DNA
caagtagctgggaccacagg

SEQ ID NO: 282325 - DNA, 20 bp, synthetic construct
  source 1..20: mol_type = other DNA
ccaagtagctgggaccacag

SEQ ID NO: 282326 - DNA, 20 bp, synthetic construct
  source 1..20: mol_type = other DNA
cccaagtagctgggaccaca

SEQ ID NO: 282327 - DNA, 20 bp, synthetic construct
  source 1..20: mol_type = other DNA
tcccaagtagctgggaccac

SEQ ID NO: 282328 - DNA, 20 bp, synthetic construct
  source 1..20: mol_type = other DNA
ctcccaagtagctgggacca

SEQ ID NO: 282329 - DNA, 20 bp, synthetic construct
  source 1..20: mol_type = other DNA
cctcccaagtagctgggacc

SEQ ID NO: 282330 - DNA, 20 bp, synthetic construct
  source 1..20: mol_type = other DNA
gcctcccaagtagctgggac

SEQ ID NO: 282331 - DNA, 20 bp, synthetic construct
  source 1..20: mol_type = other DNA
agcctcccaagtagctggga

SEQ ID NO: 282332 - DNA, 20 bp, synthetic construct
  source 1..20: mol_type = other DNA
cagcctcccaagtagctggg

SEQ ID NO: 282333 - DNA, 20 bp, synthetic construct
  source 1..20: mol_type = other DNA
tcagcctcccaagtagctgg

SEQ ID NO: 282334 - DNA, 20 bp, synthetic construct
  source 1..20: mol_type = other DNA
ttcagcctcccaagtagctg

SEQ ID NO: 282335 - DNA, 20 bp, synthetic construct
  source 1..20: mol_type = other DNA
cttcagcctcccaagtagct

SEQ ID NO: 282336 - DNA, 20 bp, synthetic construct
  source 1..20: mol_type = other DNA
acttcagcctcccaagtagc

SEQ ID NO: 282337 - DNA, 20 bp, synthetic construct
  source 1..20: mol_type = other DNA
tacttcagcctcccaagtag

SEQ ID NO: 282338 - DNA, 20 bp, synthetic construct
  source 1..20: mol_type = other DNA
ctacttcagcctcccaagta

SEQ ID NO: 282339 - DNA, 20 bp, synthetic construct
  source 1..20: mol_type = other DNA
cctacttcagcctcccaagt

SEQ ID NO: 282340 - DNA, 20 bp, synthetic construct
  source 1..20: mol_type = other DNA
tcctacttcagcctcccaag

SEQ ID NO: 282341 - DNA, 20 bp, synthetic construct
  source 1..20: mol_type = other DNA
ctcctacttcagcctcccaa

SEQ ID NO: 282342 - DNA, 20 bp, synthetic construct
  source 1..20: mol_type = other DNA
tctcctacttcagcctccca

SEQ ID NO: 282343 - DNA, 20 bp, synthetic construct
  source 1..20: mol_type = other DNA
ttctcctacttcagcctccc

SEQ ID NO: 282344 - DNA, 20 bp, synthetic construct
  source 1..20: mol_type = other DNA
attctcctacttcagcctcc

SEQ ID NO: 282345 - DNA, 20 bp, synthetic construct
  source 1..20: mol_type = other DNA
gattctcctacttcagcctc

SEQ ID NO: 282346 - DNA, 20 bp, synthetic construct
  source 1..20: mol_type = other DNA
ggattctcctacttcagcct

SEQ ID NO: 282347 - DNA, 20 bp, synthetic construct
  source 1..20: mol_type = other DNA
gggattctcctacttcagcc

SEQ ID NO: 282348 - DNA, 20 bp, synthetic construct
  source 1..20: mol_type = other DNA
ggggattctcctacttcagc

SEQ ID NO: 282349 - DNA, 20 bp, synthetic construct
  source 1..20: mol_type = other DNA
aggggattctcctacttcag

SEQ ID NO: 282350 - DNA, 20 bp, synthetic construct
  source 1..20: mol_type = other DNA
caggggattctcctacttca

SEQ ID NO: 282351 - DNA, 20 bp, synthetic construct
  source 1..20: mol_type = other DNA
tcaggggattctcctacttc

SEQ ID NO: 282352 - DNA, 20 bp, synthetic construct
  source 1..20: mol_type = other DNA
ctcaggggattctcctactt

SEQ ID NO: 282353 - DNA, 20 bp, synthetic construct
  source 1..20: mol_type = other DNA
gctcaggggattctcctact

SEQ ID NO: 282354 - DNA, 20 bp, synthetic construct
  source 1..20: mol_type = other DNA
ggctcaggggattctcctac

SEQ ID NO: 282355 - DNA, 20 bp, synthetic construct
  source 1..20: mol_type = other DNA
gggctcaggggattctccta

SEQ ID NO: 282356 - DNA, 20 bp, synthetic construct
  source 1..20: mol_type = other DNA
agggctcaggggattctcct

SEQ ID NO: 282357 - DNA, 20 bp, synthetic construct
  source 1..20: mol_type = other DNA
cagggctcaggggattctcc

SEQ ID NO: 282358 - DNA, 20 bp, synthetic construct
  source 1..20: mol_type = other DNA
ccagggctcaggggattctc

SEQ ID NO: 282359 - DNA, 20 bp, synthetic construct
  source 1..20: mol_type = other DNA
cccagggctcaggggattct

SEQ ID NO: 282360 - DNA, 20 bp, synthetic construct
  source 1..20: mol_type = other DNA
tcccagggctcaggggattc

SEQ ID NO: 282361 - DNA, 20 bp, synthetic construct
  source 1..20: mol_type = other DNA
ttcccagggctcaggggatt

SEQ ID NO: 282362 - DNA, 20 bp, synthetic construct
  source 1..20: mol_type = other DNA
cttcccagggctcaggggat

SEQ ID NO: 282363 - DNA, 20 bp, synthetic construct
  source 1..20: mol_type = other DNA
acttcccagggctcagggga

SEQ ID NO: 282364 - DNA, 20 bp, synthetic construct
  source 1..20: mol_type = other DNA
gacttcccagggctcagggg

SEQ ID NO: 282365 - DNA, 20 bp, synthetic construct
  source 1..20: mol_type = other DNA
cgacttcccagggctcaggg

SEQ ID NO: 282366 - DNA, 20 bp, synthetic construct
  source 1..20: mol_type = other DNA
tcgacttcccagggctcagg

SEQ ID NO: 282367 - DNA, 20 bp, synthetic construct
  source 1..20: mol_type = other DNA
ctcgacttcccagggctcag

SEQ ID NO: 282368 - DNA, 20 bp, synthetic construct
  source 1..20: mol_type = other DNA
cctcgacttcccagggctca

SEQ ID NO: 282369 - DNA, 20 bp, synthetic construct
  source 1..20: mol_type = other DNA
gcctcgacttcccagggctc

SEQ ID NO: 282370 - DNA, 20 bp, synthetic construct
  source 1..20: mol_type = other DNA
agcctcgacttcccagggct

SEQ ID NO: 282371 - DNA, 20 bp, synthetic construct
  source 1..20: mol_type = other DNA
cagcctcgacttcccagggc

SEQ ID NO: 282372 - DNA, 20 bp, synthetic construct
  source 1..20: mol_type = other DNA
gcagcctcgacttcccaggg

SEQ ID NO: 282373 - DNA, 20 bp, synthetic construct
  source 1..20: mol_type = other DNA
tgcagcctcgacttcccagg

SEQ ID NO: 282374 - DNA, 20 bp, synthetic construct
  source 1..20: mol_type = other DNA
gtgcagcctcgacttcccag

SEQ ID NO: 282375 - DNA, 20 bp, synthetic construct
  source 1..20: mol_type = other DNA
agtgcagcctcgacttccca

SEQ ID NO: 282376 - DNA, 20 bp, synthetic construct
  source 1..20: mol_type = other DNA
cagtgcagcctcgacttccc

SEQ ID NO: 282377 - DNA, 20 bp, synthetic construct
  source 1..20: mol_type = other DNA
tcagtgcagcctcgacttcc

SEQ ID NO: 282378 - DNA, 20 bp, synthetic construct
  source 1..20: mol_type = other DNA
ctcagtgcagcctcgacttc

SEQ ID NO: 282379 - DNA, 20 bp, synthetic construct
  source 1..20: mol_type = other DNA
gctcagtgcagcctcgactt

SEQ ID NO: 282380 - DNA, 20 bp, synthetic construct
  source 1..20: mol_type = other DNA
ggctcagtgcagcctcgact

SEQ ID NO: 282381 - DNA, 20 bp, synthetic construct
  source 1..20: mol_type = other DNA
cggctcagtgcagcctcgac

SEQ ID NO: 282382 - DNA, 20 bp, synthetic construct
  source 1..20: mol_type = other DNA
acggctcagtgcagcctcga

SEQ ID NO: 282383 - DNA, 20 bp, synthetic construct
  source 1..20: mol_type = other DNA
cacggctcagtgcagcctcg

SEQ ID NO: 282384 - DNA, 20 bp, synthetic construct
  source 1..20: mol_type = other DNA
tcacggctcagtgcagcctc

SEQ ID NO: 282385 - DNA, 20 bp, synthetic construct
  source 1..20: mol_type = other DNA
atcacggctcagtgcagcct

SEQ ID NO: 282386 - DNA, 20 bp, synthetic construct
  source 1..20: mol_type = other DNA
catcacggctcagtgcagcc

SEQ ID NO: 282387 - DNA, 20 bp, synthetic construct
  source 1..20: mol_type = other DNA
ccatcacggctcagtgcagc

SEQ ID NO: 282388 - DNA, 20 bp, synthetic construct
  source 1..20: mol_type = other DNA
accatcacggctcagtgcag

SEQ ID NO: 282389 - DNA, 20 bp, synthetic construct
  source 1..20: mol_type = other DNA
caccatcacggctcagtgca

SEQ ID NO: 282390 - DNA, 20 bp, synthetic construct
  source 1..20: mol_type = other DNA
acaccatcacggctcagtgc

SEQ ID NO: 282391 - DNA, 20 bp, synthetic construct
  source 1..20: mol_type = other DNA
gacaccatcacggctcagtg

SEQ ID NO: 282392 - DNA, 20 bp, synthetic construct
  source 1..20: mol_type = other DNA
tgacaccatcacggctcagt

SEQ ID NO: 282393 - DNA, 20 bp, synthetic construct
  source 1..20: mol_type = other DNA
gtgacaccatcacggctcag

SEQ ID NO: 282394 - DNA, 20 bp, synthetic construct
  source 1..20: mol_type = other DNA
agtgacaccatcacggctca

SEQ ID NO: 282395 - DNA, 20 bp, synthetic construct
  source 1..20: mol_type = other DNA
cagtgacaccatcacggctc

SEQ ID NO: 282396 - DNA, 20 bp, synthetic construct
  source 1..20: mol_type = other DNA
gcagtgacaccatcacggct

SEQ ID NO: 282397 - DNA, 20 bp, synthetic construct
  source 1..20: mol_type = other DNA
tgcagtgacaccatcacggc

SEQ ID NO: 282398 - DNA, 20 bp, synthetic construct
  source 1..20: mol_type = other DNA
gtgcagtgacaccatcacgg

SEQ ID NO: 282399 - DNA, 20 bp, synthetic construct
  source 1..20: mol_type = other DNA
agtgcagtgacaccatcacg

SEQ ID NO: 282400 - DNA, 20 bp, synthetic construct
  source 1..20: mol_type = other DNA
gagtgcagtgacaccatcac

SEQ ID NO: 282401 - DNA, 20 bp, synthetic construct
  source 1..20: mol_type = other DNA
ggagtgcagtgacaccatca

SEQ ID NO: 282402 - DNA, 20 bp, synthetic construct
  source 1..20: mol_type = other DNA
tggagtgcagtgacaccatc

SEQ ID NO: 282403 - DNA, 20 bp, synthetic construct
  source 1..20: mol_type = other DNA
ctggagtgcagtgacaccat

SEQ ID NO: 282404 - DNA, 20 bp, synthetic construct
  source 1..20: mol_type = other DNA
gctggagtgcagtgacacca

SEQ ID NO: 282405 - DNA, 20 bp, synthetic construct
  source 1..20: mol_type = other DNA
ggctggagtgcagtgacacc

SEQ ID NO: 282406 - DNA, 20 bp, synthetic construct
  source 1..20: mol_type = other DNA
aggctggagtgcagtgacac

SEQ ID NO: 282407 - DNA, 20 bp, synthetic construct
  source 1..20: mol_type = other DNA
caggctggagtgcagtgaca

SEQ ID NO: 282408 - DNA, 20 bp, synthetic construct
  source 1..20: mol_type = other DNA
ccaggctggagtgcagtgac

SEQ ID NO: 282409 - DNA, 20 bp, synthetic construct
  source 1..20: mol_type = other DNA
cccaggctggagtgcagtga

SEQ ID NO: 282410 - DNA, 20 bp, synthetic construct
  source 1..20: mol_type = other DNA
acccaggctggagtgcagtg

SEQ ID NO: 282411 - DNA, 20 bp, synthetic construct
  source 1..20: mol_type = other DNA
cacccaggctggagtgcagt

SEQ ID NO: 282412 - DNA, 20 bp, synthetic construct
  source 1..20: mol_type = other DNA
tcacccaggctggagtgcag

SEQ ID NO: 282413 - DNA, 20 bp, synthetic construct
  source 1..20: mol_type = other DNA
gtcacccaggctggagtgca

SEQ ID NO: 282414 - DNA, 20 bp, synthetic construct
  source 1..20: mol_type = other DNA
tgtcacccaggctggagtgc

SEQ ID NO: 282415 - DNA, 20 bp, synthetic construct
  source 1..20: mol_type = other DNA
ttgtcacccaggctggagtg

SEQ ID NO: 282416 - DNA, 20 bp, synthetic construct
  source 1..20: mol_type = other DNA
tttgtcacccaggctggagt

SEQ ID NO: 282417 - DNA, 20 bp, synthetic construct
  source 1..20: mol_type = other DNA
ctttgtcacccaggctggag

SEQ ID NO: 282418 - DNA, 20 bp, synthetic construct
  source 1..20: mol_type = other DNA
actttgtcacccaggctgga

SEQ ID NO: 282419 - DNA, 20 bp, synthetic construct
  source 1..20: mol_type = other DNA
cactttgtcacccaggctgg

SEQ ID NO: 282420 - DNA, 20 bp, synthetic construct
  source 1..20: mol_type = other DNA
tcactttgtcacccaggctg

SEQ ID NO: 282421 - DNA, 20 bp, synthetic construct
  source 1..20: mol_type = other DNA
ctcactttgtcacccaggct

SEQ ID NO: 282422 - DNA, 20 bp, synthetic construct
  source 1..20: mol_type = other DNA
tctcactttgtcacccaggc

SEQ ID NO: 282423 - DNA, 20 bp, synthetic construct
  source 1..20: mol_type = other DNA
gtctcactttgtcacccagg

SEQ ID NO: 282424 - DNA, 20 bp, synthetic construct
  source 1..20: mol_type = other DNA
ggtctcactttgtcacccag

SEQ ID NO: 282425 - DNA, 20 bp, synthetic construct
  source 1..20: mol_type = other DNA
gggtctcactttgtcaccca

SEQ ID NO: 282426 - DNA, 20 bp, synthetic construct
  source 1..20: mol_type = other DNA
agggtctcactttgtcaccc

SEQ ID NO: 282427 - DNA, 20 bp, synthetic construct
  source 1..20: mol_type = other DNA
tagggtctcactttgtcacc

SEQ ID NO: 282428 - DNA, 20 bp, synthetic construct
  source 1..20: mol_type = other DNA
atagggtctcactttgtcac

SEQ ID NO: 282429 - DNA, 20 bp, synthetic construct
  source 1..20: mol_type = other DNA
gatagggtctcactttgtca

SEQ ID NO: 282430 - DNA, 20 bp, synthetic construct
  source 1..20: mol_type = other DNA
agatagggtctcactttgtc

SEQ ID NO: 282431 - DNA, 20 bp, synthetic construct
  source 1..20: mol_type = other DNA
gagatagggtctcactttgt

SEQ ID NO: 282432 - DNA, 20 bp, synthetic construct
  source 1..20: mol_type = other DNA
tgagatagggtctcactttg

SEQ ID NO: 282433 - DNA, 20 bp, synthetic construct
  source 1..20: mol_type = other DNA
gtgagatagggtctcacttt

SEQ ID NO: 282434 - DNA, 20 bp, synthetic construct
  source 1..20: mol_type = other DNA
tgtgagatagggtctcactt

SEQ ID NO: 282435 - DNA, 20 bp, synthetic construct
  source 1..20: mol_type = other DNA
ttgtgagatagggtctcact

SEQ ID NO: 282436 - DNA, 20 bp, synthetic construct
  source 1..20: mol_type = other DNA
tttgtgagatagggtctcac

SEQ ID NO: 282437 - DNA, 20 bp, synthetic construct
  source 1..20: mol_type = other DNA
ctttgtgagatagggtctca

SEQ ID NO: 282438 - DNA, 20 bp, synthetic construct
  source 1..20: mol_type = other DNA
tctttgtgagatagggtctc

SEQ ID NO: 282439 - DNA, 20 bp, synthetic construct
  source 1..20: mol_type = other DNA
ttctttgtgagatagggtct

SEQ ID NO: 282440 - DNA, 20 bp, synthetic construct
  source 1..20: mol_type = other DNA
tttctttgtgagatagggtc

SEQ ID NO: 282441 - DNA, 20 bp, synthetic construct
  source 1..20: mol_type = other DNA
ttttctttgtgagatagggt

SEQ ID NO: 282442 - DNA, 20 bp, synthetic construct
  source 1..20: mol_type = other DNA
tttttctttgtgagataggg

SEQ ID NO: 282443 - DNA, 20 bp, synthetic construct
  source 1..20: mol_type = other DNA
ttttttctttgtgagatagg

SEQ ID NO: 282444 - DNA, 20 bp, synthetic construct
  source 1..20: mol_type = other DNA
tttttttctttgtgagatag

SEQ ID NO: 282445 - DNA, 20 bp, synthetic construct
  source 1..20: mol_type = other DNA
ttttttttctttgtgagata

SEQ ID NO: 282446 - DNA, 20 bp, synthetic construct
  source 1..20: mol_type = other DNA
gttttttttctttgtgagat

SEQ ID NO: 282447 - DNA, 20 bp, synthetic construct
  source 1..20: mol_type = other DNA
tgttttttttctttgtgaga

SEQ ID NO: 282448 - DNA, 20 bp, synthetic construct
  source 1..20: mol_type = other DNA
ttgttttttttctttgtgag

SEQ ID NO: 282449 - DNA, 20 bp, synthetic construct
  source 1..20: mol_type = other DNA
tttgttttttttctttgtga

SEQ ID NO: 282450 - DNA, 20 bp, synthetic construct
  source 1..20: mol_type = other DNA
ttttgttttttttctttgtg

SEQ ID NO: 282451 - DNA, 20 bp, synthetic construct
  source 1..20: mol_type = other DNA
gttttgttttttttctttgt

SEQ ID NO: 282452 - DNA, 20 bp, synthetic construct
  source 1..20: mol_type = other DNA
tgttttgttttttttctttg

SEQ ID NO: 282453 - DNA, 20 bp, synthetic construct
  source 1..20: mol_type = other DNA
ttgttttgttttttttcttt

SEQ ID NO: 282454 - DNA, 20 bp, synthetic construct
  source 1..20: mol_type = other DNA
tttgttttgttttttttctt

SEQ ID NO: 282455 - DNA, 20 bp, synthetic construct
  source 1..20: mol_type = other DNA
ttttgttttgttttttttct

SEQ ID NO: 282456 - DNA, 20 bp, synthetic construct
  source 1..20: mol_type = other DNA
tttttgttttgttttttttc

SEQ ID NO: 282457 - DNA, 20 bp, synthetic construct
  source 1..20: mol_type = other DNA
ttttttgttttgtttttttt

SEQ ID NO: 282458 - DNA, 20 bp, synthetic construct
  source 1..20: mol_type = other DNA
gttttttgttttgttttttt

SEQ ID NO: 282459 - DNA, 20 bp, synthetic construct
  source 1..20: mol_type = other DNA
ggttttttgttttgtttttt

SEQ ID NO: 282460 - DNA, 20 bp, synthetic construct
  source 1..20: mol_type = other DNA
gggttttttgttttgttttt

SEQ ID NO: 282461 - DNA, 20 bp, synthetic construct
  source 1..20: mol_type = other DNA
tgggttttttgttttgtttt

SEQ ID NO: 282462 - DNA, 20 bp, synthetic construct
  source 1..20: mol_type = other DNA
ttgggttttttgttttgttt

SEQ ID NO: 282463 - DNA, 20 bp, synthetic construct
  source 1..20: mol_type = other DNA
tttgggttttttgttttgtt

SEQ ID NO: 282464 - DNA, 20 bp, synthetic construct
  source 1..20: mol_type = other DNA
ctttgggttttttgttttgt

SEQ ID NO: 282465 - DNA, 20 bp, synthetic construct
  source 1..20: mol_type = other DNA
gctttgggttttttgttttg

SEQ ID NO: 282466 - DNA, 20 bp, synthetic construct
  source 1..20: mol_type = other DNA
tgctttgggttttttgtttt

SEQ ID NO: 282467 - DNA, 20 bp, synthetic construct
  source 1..20: mol_type = other DNA
gtgctttgggttttttgttt

SEQ ID NO: 282468 - DNA, 20 bp, synthetic construct
  source 1..20: mol_type = other DNA
tgtgctttgggttttttgtt

SEQ ID NO: 282469 - DNA, 20 bp, synthetic construct
  source 1..20: mol_type = other DNA
gtgtgctttgggttttttgt

SEQ ID NO: 282470 - DNA, 20 bp, synthetic construct
  source 1..20: mol_type = other DNA
agtgtgctttgggttttttg

SEQ ID NO: 282471 - DNA, 20 bp, synthetic construct
  source 1..20: mol_type = other DNA
cagtgtgctttgggtttttt

SEQ ID NO: 282472 - DNA, 20 bp, synthetic construct
  source 1..20: mol_type = other DNA
acagtgtgctttgggttttt

SEQ ID NO: 282473 - DNA, 20 bp, synthetic construct
  source 1..20: mol_type = other DNA
aacagtgtgctttgggtttt

SEQ ID NO: 282474 - DNA, 20 bp, synthetic construct
  source 1..20: mol_type = other DNA
aaacagtgtgctttgggttt

SEQ ID NO: 282475 - DNA, 20 bp, synthetic construct
  source 1..20: mol_type = other DNA
gaaacagtgtgctttgggtt

SEQ ID NO: 282476 - DNA, 20 bp, synthetic construct
  source 1..20: mol_type = other DNA
ggaaacagtgtgctttgggt

SEQ ID NO: 282477 - DNA, 20 bp, synthetic construct
  source 1..20: mol_type = other DNA
tggaaacagtgtgctttggg

SEQ ID NO: 282478 - DNA, 20 bp, synthetic construct
  source 1..20: mol_type = other DNA
gtggaaacagtgtgctttgg

SEQ ID NO: 282479 - DNA, 20 bp, synthetic construct
  source 1..20: mol_type = other DNA
agtggaaacagtgtgctttg

SEQ ID NO: 282480 - DNA, 20 bp, synthetic construct
  source 1..20: mol_type = other DNA
cagtggaaacagtgtgcttt

SEQ ID NO: 282481 - DNA, 20 bp, synthetic construct
  source 1..20: mol_type = other DNA
acagtggaaacagtgtgctt

SEQ ID NO: 282482 - DNA, 20 bp, synthetic construct
  source 1..20: mol_type = other DNA
aacagtggaaacagtgtgct

SEQ ID NO: 282483 - DNA, 20 bp, synthetic construct
  source 1..20: mol_type = other DNA
aaacagtggaaacagtgtgc

SEQ ID NO: 282484 - DNA, 20 bp, synthetic construct
  source 1..20: mol_type = other DNA
gaaacagtggaaacagtgtg

SEQ ID NO: 282485 - DNA, 20 bp, synthetic construct
  source 1..20: mol_type = other DNA
ggaaacagtggaaacagtgt

SEQ ID NO: 282486 - DNA, 20 bp, synthetic construct
  source 1..20: mol_type = other DNA
tggaaacagtggaaacagtg

SEQ ID NO: 282487 - DNA, 20 bp, synthetic construct
  source 1..20: mol_type = other DNA
ctggaaacagtggaaacagt

SEQ ID NO: 282488 - DNA, 20 bp, synthetic construct
  source 1..20: mol_type = other DNA
tctggaaacagtggaaacag

SEQ ID NO: 282489 - DNA, 20 bp, synthetic construct
  source 1..20: mol_type = other DNA
ctctggaaacagtggaaaca

SEQ ID NO: 282490 - DNA, 20 bp, synthetic construct
  source 1..20: mol_type = other DNA
actctggaaacagtggaaac

SEQ ID NO: 282491 - DNA, 20 bp, synthetic construct
  source 1..20: mol_type = other DNA
aactctggaaacagtggaaa

SEQ ID NO: 282492 - DNA, 20 bp, synthetic construct
  source 1..20: mol_type = other DNA
gaactctggaaacagtggaa

SEQ ID NO: 282493 - DNA, 20 bp, synthetic construct
  source 1..20: mol_type = other DNA
ggaactctggaaacagtgga

SEQ ID NO: 282494 - DNA, 20 bp, synthetic construct
  source 1..20: mol_type = other DNA
aggaactctggaaacagtgg

SEQ ID NO: 282495 - DNA, 20 bp, synthetic construct
  source 1..20: mol_type = other DNA
caggaactctggaaacagtg

SEQ ID NO: 282496 - DNA, 20 bp, synthetic construct
  source 1..20: mol_type = other DNA
tcaggaactctggaaacagt

SEQ ID NO: 282497 - DNA, 20 bp, synthetic construct
  source 1..20: mol_type = other DNA
ctcaggaactctggaaacag

SEQ ID NO: 282498 - DNA, 20 bp, synthetic construct
  source 1..20: mol_type = other DNA
tctcaggaactctggaaaca

SEQ ID NO: 282499 - DNA, 20 bp, synthetic construct
  source 1..20: mol_type = other DNA
ctctcaggaactctggaaac

SEQ ID NO: 282500 - DNA, 20 bp, synthetic construct
  source 1..20: mol_type = other DNA
cctctcaggaactctggaaa

SEQ ID NO: 282501 - DNA, 20 bp, synthetic construct
  source 1..20: mol_type = other DNA
tcctctcaggaactctggaa

SEQ ID NO: 282502 - DNA, 20 bp, synthetic construct
  source 1..20: mol_type = other DNA
ttcctctcaggaactctgga

SEQ ID NO: 282503 - DNA, 20 bp, synthetic construct
  source 1..20: mol_type = other DNA
tttcctctcaggaactctgg

SEQ ID NO: 282504 - DNA, 20 bp, synthetic construct
  source 1..20: mol_type = other DNA
ctttcctctcaggaactctg

SEQ ID NO: 282505 - DNA, 20 bp, synthetic construct
  source 1..20: mol_type = other DNA
cctttcctctcaggaactct

SEQ ID NO: 282506 - DNA, 20 bp, synthetic construct
  source 1..20: mol_type = other DNA
acctttcctctcaggaactc

SEQ ID NO: 282507 - DNA, 20 bp, synthetic construct
  source 1..20: mol_type = other DNA
gacctttcctctcaggaact

SEQ ID NO: 282508 - DNA, 20 bp, synthetic construct
  source 1..20: mol_type = other DNA
tgacctttcctctcaggaac

SEQ ID NO: 282509 - DNA, 20 bp, synthetic construct
  source 1..20: mol_type = other DNA
gtgacctttcctctcaggaa

SEQ ID NO: 282510 - DNA, 20 bp, synthetic construct
  source 1..20: mol_type = other DNA
ggtgacctttcctctcagga

SEQ ID NO: 282511 - DNA, 20 bp, synthetic construct
  source 1..20: mol_type = other DNA
cggtgacctttcctctcagg

SEQ ID NO: 282512 - DNA, 20 bp, synthetic construct
  source 1..20: mol_type = other DNA
ccggtgacctttcctctcag

SEQ ID NO: 282513 - DNA, 20 bp, synthetic construct
  source 1..20: mol_type = other DNA
cccggtgacctttcctctca

SEQ ID NO: 282514 - DNA, 20 bp, synthetic construct
  source 1..20: mol_type = other DNA
acccggtgacctttcctctc

SEQ ID NO: 282515 - DNA, 20 bp, synthetic construct
  source 1..20: mol_type = other DNA
cacccggtgacctttcctct

SEQ ID NO: 282516 - DNA, 20 bp, synthetic construct
  source 1..20: mol_type = other DNA
tcacccggtgacctttcctc

SEQ ID NO: 282517 - DNA, 20 bp, synthetic construct
  source 1..20: mol_type = other DNA
ctcacccggtgacctttcct

SEQ ID NO: 282518 - DNA, 20 bp, synthetic construct
  source 1..20: mol_type = other DNA
cctcacccggtgacctttcc

SEQ ID NO: 282519 - DNA, 20 bp, synthetic construct
  source 1..20: mol_type = other DNA
tcctcacccggtgacctttc

SEQ ID NO: 282520 - DNA, 20 bp, synthetic construct
  source 1..20: mol_type = other DNA
ttcctcacccggtgaccttt

SEQ ID NO: 282521 - DNA, 20 bp, synthetic construct
  source 1..20: mol_type = other DNA
cttcctcacccggtgacctt

SEQ ID NO: 282522 - DNA, 20 bp, synthetic construct
  source 1..20: mol_type = other DNA
tcttcctcacccggtgacct

SEQ ID NO: 282523 - DNA, 20 bp, synthetic construct
  source 1..20: mol_type = other DNA
gtcttcctcacccggtgacc

SEQ ID NO: 282524 - DNA, 20 bp, synthetic construct
  source 1..20: mol_type = other DNA
cgtcttcctcacccggtgac

SEQ ID NO: 282525 - DNA, 20 bp, synthetic construct
  source 1..20: mol_type = other DNA
acgtcttcctcacccggtga

SEQ ID NO: 282526 - DNA, 20 bp, synthetic construct
  source 1..20: mol_type = other DNA
aacgtcttcctcacccggtg

SEQ ID NO: 282527 - DNA, 20 bp, synthetic construct
  source 1..20: mol_type = other DNA
gaacgtcttcctcacccggt

SEQ ID NO: 282528 - DNA, 20 bp, synthetic construct
  source 1..20: mol_type = other DNA
agaacgtcttcctcacccgg

SEQ ID NO: 282529 - DNA, 20 bp, synthetic construct
  source 1..20: mol_type = other DNA
gagaacgtcttcctcacccg

SEQ ID NO: 282530 - DNA, 20 bp, synthetic construct
  source 1..20: mol_type = other DNA
tgagaacgtcttcctcaccc

SEQ ID NO: 282531 - DNA, 20 bp, synthetic construct
  source 1..20: mol_type = other DNA
gtgagaacgtcttcctcacc

SEQ ID NO: 282532 - DNA, 20 bp, synthetic construct
  source 1..20: mol_type = other DNA
agtgagaacgtcttcctcac

SEQ ID NO: 282533 - DNA, 20 bp, synthetic construct
  source 1..20: mol_type = other DNA
cagtgagaacgtcttcctca

SEQ ID NO: 282534 - DNA, 20 bp, synthetic construct
  source 1..20: mol_type = other DNA
tcagtgagaacgtcttcctc

SEQ ID NO: 282535 - DNA, 20 bp, synthetic construct
  source 1..20: mol_type = other DNA
atcagtgagaacgtcttcct

SEQ ID NO: 282536 - DNA, 20 bp, synthetic construct
  source 1..20: mol_type = other DNA
gatcagtgagaacgtcttcc

SEQ ID NO: 282537 - DNA, 20 bp, synthetic construct
  source 1..20: mol_type = other DNA
agatcagtgagaacgtcttc

SEQ ID NO: 282538 - DNA, 20 bp, synthetic construct
  source 1..20: mol_type = other DNA
cagatcagtgagaacgtctt

SEQ ID NO: 282539 - DNA, 20 bp, synthetic construct
  source 1..20: mol_type = other DNA
ccagatcagtgagaacgtct

SEQ ID NO: 282540 - DNA, 20 bp, synthetic construct
  source 1..20: mol_type = other DNA
gccagatcagtgagaacgtc

SEQ ID NO: 282541 - DNA, 20 bp, synthetic construct
  source 1..20: mol_type = other DNA
tgccagatcagtgagaacgt

SEQ ID NO: 282542 - DNA, 20 bp, synthetic construct
  source 1..20: mol_type = other DNA
ctgccagatcagtgagaacg

SEQ ID NO: 282543 - DNA, 20 bp, synthetic construct
  source 1..20: mol_type = other DNA
tctgccagatcagtgagaac

SEQ ID NO: 282544 - DNA, 20 bp, synthetic construct
  source 1..20: mol_type = other DNA
ctctgccagatcagtgagaa

SEQ ID NO: 282545 - DNA, 20 bp, synthetic construct
  source 1..20: mol_type = other DNA
tctctgccagatcagtgaga

SEQ ID NO: 282546 - DNA, 20 bp, synthetic construct
  source 1..20: mol_type = other DNA
ttctctgccagatcagtgag

SEQ ID NO: 282547 - DNA, 20 bp, synthetic construct
  source 1..20: mol_type = other DNA
tttctctgccagatcagtga

SEQ ID NO: 282548 - DNA, 20 bp, synthetic construct
  source 1..20: mol_type = other DNA
ttttctctgccagatcagtg

SEQ ID NO: 282549 - DNA, 20 bp, synthetic construct
  source 1..20: mol_type = other DNA
attttctctgccagatcagt

SEQ ID NO: 282550 - DNA, 20 bp, synthetic construct
  source 1..20: mol_type = other DNA
cattttctctgccagatcag

SEQ ID NO: 282551 - DNA, 20 bp, synthetic construct
  source 1..20: mol_type = other DNA
acattttctctgccagatca

SEQ ID NO: 282552 - DNA, 20 bp, synthetic construct
  source 1..20: mol_type = other DNA
gacattttctctgccagatc

SEQ ID NO: 282553 - DNA, 20 bp, synthetic construct
  source 1..20: mol_type = other DNA
ggacattttctctgccagat

SEQ ID NO: 282554 - DNA, 20 bp, synthetic construct
  source 1..20: mol_type = other DNA
tggacattttctctgccaga

SEQ ID NO: 282555 - DNA, 20 bp, synthetic construct
  source 1..20: mol_type = other DNA
ctggacattttctctgccag

SEQ ID NO: 282556 - DNA, 20 bp, synthetic construct
  source 1..20: mol_type = other DNA
actggacattttctctgcca

SEQ ID NO: 282557 - DNA, 20 bp, synthetic construct
  source 1..20: mol_type = other DNA
aactggacattttctctgcc

SEQ ID NO: 282558 - DNA, 20 bp, synthetic construct
  source 1..20: mol_type = other DNA
aaactggacattttctctgc

SEQ ID NO: 282559 - DNA, 20 bp, synthetic construct
  source 1..20: mol_type = other DNA
aaaactggacattttctctg

SEQ ID NO: 282560 - DNA, 20 bp, synthetic construct
  source 1..20: mol_type = other DNA
aaaaactggacattttctct

SEQ ID NO: 282561 - DNA, 20 bp, synthetic construct
  source 1..20: mol_type = other DNA
gaaaaactggacattttctc

SEQ ID NO: 282562 - DNA, 20 bp, synthetic construct
  source 1..20: mol_type = other DNA
ggaaaaactggacattttct

SEQ ID NO: 282563 - DNA, 20 bp, synthetic construct
  source 1..20: mol_type = other DNA
tggaaaaactggacattttc

SEQ ID NO: 282564 - DNA, 20 bp, synthetic construct
  source 1..20: mol_type = other DNA
ttggaaaaactggacatttt

SEQ ID NO: 282565 - DNA, 20 bp, synthetic construct
  source 1..20: mol_type = other DNA
gttggaaaaactggacattt

SEQ ID NO: 282566 - DNA, 20 bp, synthetic construct
  source 1..20: mol_type = other DNA
agttggaaaaactggacatt

SEQ ID NO: 282567 - DNA, 20 bp, synthetic construct
  source 1..20: mol_type = other DNA
gagttggaaaaactggacat

SEQ ID NO: 282568 - DNA, 20 bp, synthetic construct
  source 1..20: mol_type = other DNA
ggagttggaaaaactggaca

SEQ ID NO: 282569 - DNA, 20 bp, synthetic construct
  source 1..20: mol_type = other DNA
gggagttggaaaaactggac

SEQ ID NO: 282570 - DNA, 20 bp, synthetic construct
  source 1..20: mol_type = other DNA
agggagttggaaaaactgga

SEQ ID NO: 282571 - DNA, 20 bp, synthetic construct
  source 1..20: mol_type = other DNA
tagggagttggaaaaactgg

SEQ ID NO: 282572 - DNA, 20 bp, synthetic construct
  source 1..20: mol_type = other DNA
ttagggagttggaaaaactg

SEQ ID NO: 282573 - DNA, 20 bp, synthetic construct
  source 1..20: mol_type = other DNA
tttagggagttggaaaaact

SEQ ID NO: 282574 - DNA, 20 bp, synthetic construct
  source 1..20: mol_type = other DNA
gtttagggagttggaaaaac

SEQ ID NO: 282575 - DNA, 20 bp, synthetic construct
  source 1..20: mol_type = other DNA
ggtttagggagttggaaaaa

SEQ ID NO: 282576 - DNA, 20 bp, synthetic construct
  source 1..20: mol_type = other DNA
tggtttagggagttggaaaa

SEQ ID NO: 282577 - DNA, 20 bp, synthetic construct
  source 1..20: mol_type = other DNA
atggtttagggagttggaaa

SEQ ID NO: 282578 - DNA, 20 bp, synthetic construct
  source 1..20: mol_type = other DNA
catggtttagggagttggaa

SEQ ID NO: 282579 - DNA, 20 bp, synthetic construct
  source 1..20: mol_type = other DNA
ccatggtttagggagttgga

SEQ ID NO: 282580 - DNA, 20 bp, synthetic construct
  source 1..20: mol_type = other DNA
accatggtttagggagttgg

SEQ ID NO: 282581 - DNA, 20 bp, synthetic construct
  source 1..20: mol_type = other DNA
aaccatggtttagggagttg

SEQ ID NO: 282582 - DNA, 20 bp, synthetic construct
  source 1..20: mol_type = other DNA
aaaccatggtttagggagtt

SEQ ID NO: 282583 - DNA, 20 bp, synthetic construct
  source 1..20: mol_type = other DNA
aaaaccatggtttagggagt

SEQ ID NO: 282584 - DNA, 20 bp, synthetic construct
  source 1..20: mol_type = other DNA
gaaaaccatggtttagggag

SEQ ID NO: 282585 - DNA, 20 bp, synthetic construct
  source 1..20: mol_type = other DNA
agaaaaccatggtttaggga

SEQ ID NO: 282586 - DNA, 20 bp, synthetic construct
  source 1..20: mol_type = other DNA
tagaaaaccatggtttaggg

SEQ ID NO: 282587 - DNA, 20 bp, synthetic construct
  source 1..20: mol_type = other DNA
atagaaaaccatggtttagg

SEQ ID NO: 282588 - DNA, 20 bp, synthetic construct
  source 1..20: mol_type = other DNA
aatagaaaaccatggtttag

SEQ ID NO: 282589 - DNA, 20 bp, synthetic construct
  source 1..20: mol_type = other DNA
aaatagaaaaccatggttta

SEQ ID NO: 282590 - DNA, 20 bp, synthetic construct
  source 1..20: mol_type = other DNA
gaaatagaaaaccatggttt

SEQ ID NO: 282591 - DNA, 20 bp, synthetic construct
  source 1..20: mol_type = other DNA
tgaaatagaaaaccatggtt

SEQ ID NO: 282592 - DNA, 20 bp, synthetic construct
  source 1..20: mol_type = other DNA
atgaaatagaaaaccatggt

SEQ ID NO: 282593 - DNA, 20 bp, synthetic construct
  source 1..20: mol_type = other DNA
tatgaaatagaaaaccatgg

SEQ ID NO: 282594 - DNA, 20 bp, synthetic construct
  source 1..20: mol_type = other DNA
ctatgaaatagaaaaccatg

SEQ ID NO: 282595 - DNA, 20 bp, synthetic construct
  source 1..20: mol_type = other DNA
actatgaaatagaaaaccat

SEQ ID NO: 282596 - DNA, 20 bp, synthetic construct
  source 1..20: mol_type = other DNA
aactatgaaatagaaaacca

SEQ ID NO: 282597 - DNA, 20 bp, synthetic construct
  source 1..20: mol_type = other DNA
gaactatgaaatagaaaacc

SEQ ID NO: 282598 - DNA, 20 bp, synthetic construct
  source 1..20: mol_type = other DNA
agaactatgaaatagaaaac

SEQ ID NO: 282599 - DNA, 20 bp, synthetic construct
  source 1..20: mol_type = other DNA
aagaactatgaaatagaaaa

SEQ ID NO: 282600 - DNA, 20 bp, synthetic construct
  source 1..20: mol_type = other DNA
taagaactatgaaatagaaa

SEQ ID NO: 282601 - DNA, 20 bp, synthetic construct
  source 1..20: mol_type = other DNA
ctaagaactatgaaatagaa

SEQ ID NO: 282602 - DNA, 20 bp, synthetic construct
  source 1..20: mol_type = other DNA
cctaagaactatgaaataga

SEQ ID NO: 282603 - DNA, 20 bp, synthetic construct
  source 1..20: mol_type = other DNA
gcctaagaactatgaaatag

SEQ ID NO: 282604 - DNA, 20 bp, synthetic construct
  source 1..20: mol_type = other DNA
tgcctaagaactatgaaata

SEQ ID NO: 282605 - DNA, 20 bp, synthetic construct
  source 1..20: mol_type = other DNA
ttgcctaagaactatgaaat

SEQ ID NO: 282606 - DNA, 20 bp, synthetic construct
  source 1..20: mol_type = other DNA
tttgcctaagaactatgaaa

SEQ ID NO: 282607 - DNA, 20 bp, synthetic construct
  source 1..20: mol_type = other DNA
atttgcctaagaactatgaa

SEQ ID NO: 282608 - DNA, 20 bp, synthetic construct
  source 1..20: mol_type = other DNA
aatttgcctaagaactatga

SEQ ID NO: 282609 - DNA, 20 bp, synthetic construct
  source 1..20: mol_type = other DNA
caatttgcctaagaactatg

SEQ ID NO: 282610 - DNA, 20 bp, synthetic construct
  source 1..20: mol_type = other DNA
ccaatttgcctaagaactat

SEQ ID NO: 282611 - DNA, 20 bp, synthetic construct
  source 1..20: mol_type = other DNA
accaatttgcctaagaacta

SEQ ID NO: 282612 - DNA, 20 bp, synthetic construct
  source 1..20: mol_type = other DNA
taccaatttgcctaagaact

SEQ ID NO: 282613 - DNA, 20 bp, synthetic construct
  source 1..20: mol_type = other DNA
ttaccaatttgcctaagaac

SEQ ID NO: 282614 - DNA, 20 bp, synthetic construct
  source 1..20: mol_type = other DNA
tttaccaatttgcctaagaa

SEQ ID NO: 282615 - DNA, 20 bp, synthetic construct
  source 1..20: mol_type = other DNA
ttttaccaatttgcctaaga

SEQ ID NO: 282616 - DNA, 20 bp, synthetic construct
  source 1..20: mol_type = other DNA
tttttaccaatttgcctaag

SEQ ID NO: 282617 - DNA, 20 bp, synthetic construct
  source 1..20: mol_type = other DNA
atttttaccaatttgcctaa

SEQ ID NO: 282618 - DNA, 20 bp, synthetic construct
  source 1..20: mol_type = other DNA
gatttttaccaatttgccta

SEQ ID NO: 282619 - DNA, 20 bp, synthetic construct
  source 1..20: mol_type = other DNA
tgatttttaccaatttgcct

SEQ ID NO: 282620 - DNA, 20 bp, synthetic construct
  source 1..20: mol_type = other DNA
atgatttttaccaatttgcc

SEQ ID NO: 282621 - DNA, 20 bp, synthetic construct
  source 1..20: mol_type = other DNA
aatgatttttaccaatttgc

SEQ ID NO: 282622 - DNA, 20 bp, synthetic construct
  source 1..20: mol_type = other DNA
aaatgatttttaccaatttg

SEQ ID NO: 282623 - DNA, 20 bp, synthetic construct
  source 1..20: mol_type = other DNA
gaaatgatttttaccaattt

SEQ ID NO: 282624 - DNA, 20 bp, synthetic construct
  source 1..20: mol_type = other DNA
agaaatgatttttaccaatt

SEQ ID NO: 282625 - DNA, 20 bp, synthetic construct
  source 1..20: mol_type = other DNA
gagaaatgatttttaccaat

SEQ ID NO: 282626 - DNA, 20 bp, synthetic construct
  source 1..20: mol_type = other DNA
tgagaaatgatttttaccaa

SEQ ID NO: 282627 - DNA, 20 bp, synthetic construct
  source 1..20: mol_type = other DNA
atgagaaatgatttttacca

SEQ ID NO: 282628 - DNA, 20 bp, synthetic construct
  source 1..20: mol_type = other DNA
gatgagaaatgatttttacc

SEQ ID NO: 282629 - DNA, 20 bp, synthetic construct
  source 1..20: mol_type = other DNA
tgatgagaaatgatttttac

SEQ ID NO: 282630 - DNA, 20 bp, synthetic construct
  source 1..20: mol_type = other DNA
ttgatgagaaatgattttta

SEQ ID NO: 282631 - DNA, 20 bp, synthetic construct
  source 1..20: mol_type = other DNA
tttgatgagaaatgattttt

SEQ ID NO: 282632 - DNA, 20 bp, synthetic construct
  source 1..20: mol_type = other DNA
ttttgatgagaaatgatttt

SEQ ID NO: 282633 - DNA, 20 bp, synthetic construct
  source 1..20: mol_type = other DNA
gttttgatgagaaatgattt

SEQ ID NO: 282634 - DNA, 20 bp, synthetic construct
  source 1..20: mol_type = other DNA
cgttttgatgagaaatgatt

SEQ ID NO: 282635 - DNA, 20 bp, synthetic construct
  source 1..20: mol_type = other DNA
gcgttttgatgagaaatgat

SEQ ID NO: 282636 - DNA, 20 bp, synthetic construct
  source 1..20: mol_type = other DNA
agcgttttgatgagaaatga

SEQ ID NO: 282637 - DNA, 20 bp, synthetic construct
  source 1..20: mol_type = other DNA
cagcgttttgatgagaaatg

SEQ ID NO: 282638 - DNA, 20 bp, synthetic construct
  source 1..20: mol_type = other DNA
tcagcgttttgatgagaaat

SEQ ID NO: 282639 - DNA, 20 bp, synthetic construct
  source 1..20: mol_type = other DNA
atcagcgttttgatgagaaa

SEQ ID NO: 282640 - DNA, 20 bp, synthetic construct
  source 1..20: mol_type = other DNA
tatcagcgttttgatgagaa

SEQ ID NO: 282641 - DNA, 20 bp, synthetic construct
  source 1..20: mol_type = other DNA
atatcagcgttttgatgaga

SEQ ID NO: 282642 - DNA, 20 bp, synthetic construct
  source 1..20: mol_type = other DNA
aatatcagcgttttgatgag

SEQ ID NO: 282643 - DNA, 20 bp, synthetic construct
  source 1..20: mol_type = other DNA
aaatatcagcgttttgatga

SEQ ID NO: 282644 - DNA, 20 bp, synthetic construct
  source 1..20: mol_type = other DNA
aaaatatcagcgttttgatg

SEQ ID NO: 282645 - DNA, 20 bp, synthetic construct
  source 1..20: mol_type = other DNA
gaaaatatcagcgttttgat

SEQ ID NO: 282646 - DNA, 20 bp, synthetic construct
  source 1..20: mol_type = other DNA
tgaaaatatcagcgttttga

SEQ ID NO: 282647 - DNA, 20 bp, synthetic construct
  source 1..20: mol_type = other DNA
gtgaaaatatcagcgttttg

SEQ ID NO: 282648 - DNA, 20 bp, synthetic construct
  source 1..20: mol_type = other DNA
tgtgaaaatatcagcgtttt

SEQ ID NO: 282649 - DNA, 20 bp, synthetic construct
  source 1..20: mol_type = other DNA
gtgtgaaaatatcagcgttt

SEQ ID NO: 282650 - DNA, 20 bp, synthetic construct
  source 1..20: mol_type = other DNA
ggtgtgaaaatatcagcgtt

SEQ ID NO: 282651 - DNA, 20 bp, synthetic construct
  source 1..20: mol_type = other DNA
aggtgtgaaaatatcagcgt

SEQ ID NO: 282652 - DNA, 20 bp, synthetic construct
  source 1..20: mol_type = other DNA
gaggtgtgaaaatatcagcg

SEQ ID NO: 282653 - DNA, 20 bp, synthetic construct
  source 1..20: mol_type = other DNA
ggaggtgtgaaaatatcagc

SEQ ID NO: 282654 - DNA, 20 bp, synthetic construct
  source 1..20: mol_type = other DNA
gggaggtgtgaaaatatcag

SEQ ID NO: 282655 - DNA, 20 bp, synthetic construct
  source 1..20: mol_type = other DNA
agggaggtgtgaaaatatca

SEQ ID NO: 282656 - DNA, 20 bp, synthetic construct
  source 1..20: mol_type = other DNA
cagggaggtgtgaaaatatc

SEQ ID NO: 282657 - DNA, 20 bp, synthetic construct
  source 1..20: mol_type = other DNA
ccagggaggtgtgaaaatat

SEQ ID NO: 282658 - DNA, 20 bp, synthetic construct
  source 1..20: mol_type = other DNA
accagggaggtgtgaaaata

SEQ ID NO: 282659 - DNA, 20 bp, synthetic construct
  source 1..20: mol_type = other DNA
caccagggaggtgtgaaaat

SEQ ID NO: 282660 - DNA, 20 bp, synthetic construct
  source 1..20: mol_type = other DNA
acaccagggaggtgtgaaaa

SEQ ID NO: 282661 - DNA, 20 bp, synthetic construct
  source 1..20: mol_type = other DNA
gacaccagggaggtgtgaaa

SEQ ID NO: 282662 - DNA, 20 bp, synthetic construct
  source 1..20: mol_type = other DNA
agacaccagggaggtgtgaa

SEQ ID NO: 282663 - DNA, 20 bp, synthetic construct
  source 1..20: mol_type = other DNA
cagacaccagggaggtgtga

SEQ ID NO: 282664 - DNA, 20 bp, synthetic construct
  source 1..20: mol_type = other DNA
gcagacaccagggaggtgtg

SEQ ID NO: 282665 - DNA, 20 bp, synthetic construct
  source 1..20: mol_type = other DNA
tgcagacaccagggaggtgt

SEQ ID NO: 282666 - DNA, 20 bp, synthetic construct
  source 1..20: mol_type = other DNA
ctgcagacaccagggaggtg

SEQ ID NO: 282667 - DNA, 20 bp, synthetic construct
  source 1..20: mol_type = other DNA
tctgcagacaccagggaggt

SEQ ID NO: 282668 - DNA, 20 bp, synthetic construct
  source 1..20: mol_type = other DNA
ttctgcagacaccagggagg

SEQ ID NO: 282669 - DNA, 20 bp, synthetic construct
  source 1..20: mol_type = other DNA
tttctgcagacaccagggag

SEQ ID NO: 282670 - DNA, 20 bp, synthetic construct
  source 1..20: mol_type = other DNA
ctttctgcagacaccaggga

SEQ ID NO: 282671 - DNA, 20 bp, synthetic construct
  source 1..20: mol_type = other DNA
tctttctgcagacaccaggg

SEQ ID NO: 282672 - DNA, 20 bp, synthetic construct
  source 1..20: mol_type = other DNA
ttctttctgcagacaccagg

SEQ ID NO: 282673 - DNA, 20 bp, synthetic construct
  source 1..20: mol_type = other DNA
gttctttctgcagacaccag

SEQ ID NO: 282674 - DNA, 20 bp, synthetic construct
  source 1..20: mol_type = other DNA
ggttctttctgcagacacca

SEQ ID NO: 282675 - DNA, 20 bp, synthetic construct
  source 1..20: mol_type = other DNA
aggttctttctgcagacacc

SEQ ID NO: 282676 - DNA, 20 bp, synthetic construct
  source 1..20: mol_type = other DNA
aaggttctttctgcagacac

SEQ ID NO: 282677 - DNA, 20 bp, synthetic construct
  source 1..20: mol_type = other DNA
gaaggttctttctgcagaca

SEQ ID NO: 282678 - DNA, 20 bp, synthetic construct
  source 1..20: mol_type = other DNA
ggaaggttctttctgcagac

SEQ ID NO: 282679 - DNA, 20 bp, synthetic construct
  source 1..20: mol_type = other DNA
tggaaggttctttctgcaga

SEQ ID NO: 282680 - DNA, 20 bp, synthetic construct
  source 1..20: mol_type = other DNA
ctggaaggttctttctgcag

SEQ ID NO: 282681 - DNA, 20 bp, synthetic construct
  source 1..20: mol_type = other DNA
tctggaaggttctttctgca

SEQ ID NO: 282682 - DNA, 20 bp, synthetic construct
  source 1..20: mol_type = other DNA
ttctggaaggttctttctgc

SEQ ID NO: 282683 - DNA, 20 bp, synthetic construct
  source 1..20: mol_type = other DNA
tttctggaaggttctttctg

SEQ ID NO: 282684 - DNA, 20 bp, synthetic construct
  source 1..20: mol_type = other DNA
atttctggaaggttctttct

SEQ ID NO: 282685 - DNA, 20 bp, synthetic construct
  source 1..20: mol_type = other DNA
catttctggaaggttctttc

SEQ ID NO: 282686 - DNA, 20 bp, synthetic construct
  source 1..20: mol_type = other DNA
gcatttctggaaggttcttt

SEQ ID NO: 282687 - DNA, 20 bp, synthetic construct
  source 1..20: mol_type = other DNA
tgcatttctggaaggttctt

SEQ ID NO: 282688 - DNA, 20 bp, synthetic construct
  source 1..20: mol_type = other DNA
ctgcatttctggaaggttct

SEQ ID NO: 282689 - DNA, 20 bp, synthetic construct
  source 1..20: mol_type = other DNA
actgcatttctggaaggttc

SEQ ID NO: 282690 - DNA, 20 bp, synthetic construct
  source 1..20: mol_type = other DNA
gactgcatttctggaaggtt

SEQ ID NO: 282691 - DNA, 20 bp, synthetic construct
  source 1..20: mol_type = other DNA
cgactgcatttctggaaggt

SEQ ID NO: 282692 - DNA, 20 bp, synthetic construct
  source 1..20: mol_type = other DNA
acgactgcatttctggaagg

SEQ ID NO: 282693 - DNA, 20 bp, synthetic construct
  source 1..20: mol_type = other DNA
cacgactgcatttctggaag

SEQ ID NO: 282694 - DNA, 20 bp, synthetic construct
  source 1..20: mol_type = other DNA
ccacgactgcatttctggaa

SEQ ID NO: 282695 - DNA, 20 bp, synthetic construct
  source 1..20: mol_type = other DNA
cccacgactgcatttctgga

SEQ ID NO: 282696 - DNA, 20 bp, synthetic construct
  source 1..20: mol_type = other DNA
tcccacgactgcatttctgg

SEQ ID NO: 282697 - DNA, 20 bp, synthetic construct
  source 1..20: mol_type = other DNA
ctcccacgactgcatttctg

SEQ ID NO: 282698 - DNA, 20 bp, synthetic construct
  source 1..20: mol_type = other DNA
tctcccacgactgcatttct

SEQ ID NO: 282699 - DNA, 20 bp, synthetic construct
  source 1..20: mol_type = other DNA
gtctcccacgactgcatttc

SEQ ID NO: 282700 - DNA, 20 bp, synthetic construct
  source 1..20: mol_type = other DNA
ggtctcccacgactgcattt

SEQ ID NO: 282701 - DNA, 20 bp, synthetic construct
  source 1..20: mol_type = other DNA
gggtctcccacgactgcatt

SEQ ID NO: 282702 - DNA, 20 bp, synthetic construct
  source 1..20: mol_type = other DNA
tgggtctcccacgactgcat

SEQ ID NO: 282703 - DNA, 20 bp, synthetic construct
  source 1..20: mol_type = other DNA
atgggtctcccacgactgca

SEQ ID NO: 282704 - DNA, 20 bp, synthetic construct
  source 1..20: mol_type = other DNA
gatgggtctcccacgactgc

SEQ ID NO: 282705 - DNA, 20 bp, synthetic construct
  source 1..20: mol_type = other DNA
ggatgggtctcccacgactg

SEQ ID NO: 282706 - DNA, 20 bp, synthetic construct
  source 1..20: mol_type = other DNA
tggatgggtctcccacgact

SEQ ID NO: 282707 - DNA, 20 bp, synthetic construct
  source 1..20: mol_type = other DNA
ctggatgggtctcccacgac

SEQ ID NO: 282708 - DNA, 20 bp, synthetic construct
  source 1..20: mol_type = other DNA
cctggatgggtctcccacga

SEQ ID NO: 282709 - DNA, 20 bp, synthetic construct
  source 1..20: mol_type = other DNA
gcctggatgggtctcccacg

SEQ ID NO: 282710 - DNA, 20 bp, synthetic construct
  source 1..20: mol_type = other DNA
ggcctggatgggtctcccac

SEQ ID NO: 282711 - DNA, 20 bp, synthetic construct
  source 1..20: mol_type = other DNA
tggcctggatgggtctccca

SEQ ID NO: 282712 - DNA, 20 bp, synthetic construct
  source 1..20: mol_type = other DNA
gtggcctggatgggtctccc

SEQ ID NO: 282713 - DNA, 20 bp, synthetic construct
  source 1..20: mol_type = other DNA
ggtggcctggatgggtctcc

SEQ ID NO: 282714 - DNA, 20 bp, synthetic construct
  source 1..20: mol_type = other DNA
gggtggcctggatgggtctc

SEQ ID NO: 282715 - DNA, 20 bp, synthetic construct
  source 1..20: mol_type = other DNA
ggggtggcctggatgggtct

SEQ ID NO: 282716 - DNA, 20 bp, synthetic construct
  source 1..20: mol_type = other DNA
aggggtggcctggatgggtc

SEQ ID NO: 282717 - DNA, 20 bp, synthetic construct
  source 1..20: mol_type = other DNA
caggggtggcctggatgggt

SEQ ID NO: 282718 - DNA, 20 bp, synthetic construct
  source 1..20: mol_type = other DNA
gcaggggtggcctggatggg

SEQ ID NO: 282719 - DNA, 20 bp, synthetic construct
  source 1..20: mol_type = other DNA
agcaggggtggcctggatgg

SEQ ID NO: 282720 - DNA, 20 bp, synthetic construct
  source 1..20: mol_type = other DNA
aagcaggggtggcctggatg

SEQ ID NO: 282721 - DNA, 20 bp, synthetic construct
  source 1..20: mol_type = other DNA
taagcaggggtggcctggat

SEQ ID NO: 282722 - DNA, 20 bp, synthetic construct
  source 1..20: mol_type = other DNA
ataagcaggggtggcctgga

SEQ ID NO: 282723 - DNA, 20 bp, synthetic construct
  source 1..20: mol_type = other DNA
cataagcaggggtggcctgg

SEQ ID NO: 282724 - DNA, 20 bp, synthetic construct
  source 1..20: mol_type = other DNA
ccataagcaggggtggcctg

SEQ ID NO: 282725 - DNA, 20 bp, synthetic construct
  source 1..20: mol_type = other DNA
tccataagcaggggtggcct

SEQ ID NO: 282726 - DNA, 20 bp, synthetic construct
  source 1..20: mol_type = other DNA
ttccataagcaggggtggcc

SEQ ID NO: 282727 - DNA, 20 bp, synthetic construct
  source 1..20: mol_type = other DNA
cttccataagcaggggtggc

SEQ ID NO: 282728 - DNA, 20 bp, synthetic construct
  source 1..20: mol_type = other DNA
tcttccataagcaggggtgg

SEQ ID NO: 282729 - DNA, 20 bp, synthetic construct
  source 1..20: mol_type = other DNA
ctcttccataagcaggggtg

SEQ ID NO: 282730 - DNA, 20 bp, synthetic construct
  source 1..20: mol_type = other DNA
gctcttccataagcaggggt

SEQ ID NO: 282731 - DNA, 20 bp, synthetic construct
  source 1..20: mol_type = other DNA
agctcttccataagcagggg

SEQ ID NO: 282732 - DNA, 20 bp, synthetic construct
  source 1..20: mol_type = other DNA
cagctcttccataagcaggg

SEQ ID NO: 282733 - DNA, 20 bp, synthetic construct
  source 1..20: mol_type = other DNA
tcagctcttccataagcagg

SEQ ID NO: 282734 - DNA, 20 bp, synthetic construct
  source 1..20: mol_type = other DNA
ctcagctcttccataagcag

SEQ ID NO: 282735 - DNA, 20 bp, synthetic construct
  source 1..20: mol_type = other DNA
tctcagctcttccataagca

SEQ ID NO: 282736 - DNA, 20 bp, synthetic construct
  source 1..20: mol_type = other DNA
ttctcagctcttccataagc

SEQ ID NO: 282737 - DNA, 20 bp, synthetic construct
  source 1..20: mol_type = other DNA
tttctcagctcttccataag

SEQ ID NO: 282738 - DNA, 20 bp, synthetic construct
  source 1..20: mol_type = other DNA
ttttctcagctcttccataa

SEQ ID NO: 282739 - DNA, 20 bp, synthetic construct
  source 1..20: mol_type = other DNA
tttttctcagctcttccata

SEQ ID NO: 282740 - DNA, 20 bp, synthetic construct
  source 1..20: mol_type = other DNA
ctttttctcagctcttccat

SEQ ID NO: 282741 - DNA, 20 bp, synthetic construct
  source 1..20: mol_type = other DNA
gctttttctcagctcttcca

SEQ ID NO: 282742 - DNA, 20 bp, synthetic construct
  source 1..20: mol_type = other DNA
ggctttttctcagctcttcc

SEQ ID NO: 282743 - DNA, 20 bp, synthetic construct
  source 1..20: mol_type = other DNA
gggctttttctcagctcttc

SEQ ID NO: 282744 - DNA, 20 bp, synthetic construct
  source 1..20: mol_type = other DNA
ggggctttttctcagctctt

SEQ ID NO: 282745 - DNA, 20 bp, synthetic construct
  source 1..20: mol_type = other DNA
tggggctttttctcagctct

SEQ ID NO: 282746 - DNA, 20 bp, synthetic construct
  source 1..20: mol_type = other DNA
gtggggctttttctcagctc

SEQ ID NO: 282747 - DNA, 20 bp, synthetic construct
  source 1..20: mol_type = other DNA
cgtggggctttttctcagct

SEQ ID NO: 282748 - DNA, 20 bp, synthetic construct
  source 1..20: mol_type = other DNA
ccgtggggctttttctcagc

SEQ ID NO: 282749 - DNA, 20 bp, synthetic construct
  source 1..20: mol_type = other DNA
cccgtggggctttttctcag

SEQ ID NO: 282750 - DNA, 20 bp, synthetic construct
  source 1..20: mol_type = other DNA
tcccgtggggctttttctca

SEQ ID NO: 282751 - DNA, 20 bp, synthetic construct
  source 1..20: mol_type = other DNA
ctcccgtggggctttttctc

SEQ ID NO: 282752 - DNA, 20 bp, synthetic construct
  source 1..20: mol_type = other DNA
gctcccgtggggctttttct

SEQ ID NO: 282753 - DNA, 20 bp, synthetic construct
  source 1..20: mol_type = other DNA
tgctcccgtggggctttttc

SEQ ID NO: 282754 - DNA, 20 bp, synthetic construct
  source 1..20: mol_type = other DNA
atgctcccgtggggcttttt

SEQ ID NO: 282755 - DNA, 20 bp, synthetic construct
  source 1..20: mol_type = other DNA
aatgctcccgtggggctttt

SEQ ID NO: 282756 - DNA, 20 bp, synthetic construct
  source 1..20: mol_type = other DNA
aaatgctcccgtggggcttt

SEQ ID NO: 282757 - DNA, 20 bp, synthetic construct
  source 1..20: mol_type = other DNA
caaatgctcccgtggggctt

SEQ ID NO: 282758 - DNA, 20 bp, synthetic construct
  source 1..20: mol_type = other DNA
gcaaatgctcccgtggggct

SEQ ID NO: 282759 - DNA, 20 bp, synthetic construct
  source 1..20: mol_type = other DNA
agcaaatgctcccgtggggc

SEQ ID NO: 282760 - DNA, 20 bp, synthetic construct
  source 1..20: mol_type = other DNA
gagcaaatgctcccgtgggg

SEQ ID NO: 282761 - DNA, 20 bp, synthetic construct
  source 1..20: mol_type = other DNA
tgagcaaatgctcccgtggg

SEQ ID NO: 282762 - DNA, 20 bp, synthetic construct
  source 1..20: mol_type = other DNA
ctgagcaaatgctcccgtgg

SEQ ID NO: 282763 - DNA, 20 bp, synthetic construct
  source 1..20: mol_type = other DNA
gctgagcaaatgctcccgtg

SEQ ID NO: 282764 - DNA, 20 bp, synthetic construct
  source 1..20: mol_type = other DNA
agctgagcaaatgctcccgt

SEQ ID NO: 282765 - DNA, 20 bp, synthetic construct
  source 1..20: mol_type = other DNA
aagctgagcaaatgctcccg

SEQ ID NO: 282766 - DNA, 20 bp, synthetic construct
  source 1..20: mol_type = other DNA
gaagctgagcaaatgctccc

SEQ ID NO: 282767 - DNA, 20 bp, synthetic construct
  source 1..20: mol_type = other DNA
ggaagctgagcaaatgctcc

SEQ ID NO: 282768 - DNA, 20 bp, synthetic construct
  source 1..20: mol_type = other DNA
cggaagctgagcaaatgctc

SEQ ID NO: 282769 - DNA, 20 bp, synthetic construct
  source 1..20: mol_type = other DNA
acggaagctgagcaaatgct

SEQ ID NO: 282770 - DNA, 20 bp, synthetic construct
  source 1..20: mol_type = other DNA
aacggaagctgagcaaatgc

SEQ ID NO: 282771 - DNA, 20 bp, synthetic construct
  source 1..20: mol_type = other DNA
taacggaagctgagcaaatg

SEQ ID NO: 282772 - DNA, 20 bp, synthetic construct
  source 1..20: mol_type = other DNA
gtaacggaagctgagcaaat

SEQ ID NO: 282773 - DNA, 20 bp, synthetic construct
  source 1..20: mol_type = other DNA
cgtaacggaagctgagcaaa

SEQ ID NO: 282774 - DNA, 20 bp, synthetic construct
  source 1..20: mol_type = other DNA
gcgtaacggaagctgagcaa

SEQ ID NO: 282775 - DNA, 20 bp, synthetic construct
  source 1..20: mol_type = other DNA
tgcgtaacggaagctgagca

SEQ ID NO: 282776 - DNA, 20 bp, synthetic construct
  source 1..20: mol_type = other DNA
gtgcgtaacggaagctgagc

SEQ ID NO: 282777 - DNA, 20 bp, synthetic construct
  source 1..20: mol_type = other DNA
ggtgcgtaacggaagctgag

SEQ ID NO: 282778 - DNA, 20 bp, synthetic construct
  source 1..20: mol_type = other DNA
aggtgcgtaacggaagctga

SEQ ID NO: 282779 - DNA, 20 bp, synthetic construct
  source 1..20: mol_type = other DNA
taggtgcgtaacggaagctg

SEQ ID NO: 282780 - DNA, 20 bp, synthetic construct
  source 1..20: mol_type = other DNA
ctaggtgcgtaacggaagct

SEQ ID NO: 282781 - DNA, 20 bp, synthetic construct
  source 1..20: mol_type = other DNA
actaggtgcgtaacggaagc

SEQ ID NO: 282782 - DNA, 20 bp, synthetic construct
  source 1..20: mol_type = other DNA
cactaggtgcgtaacggaag

SEQ ID NO: 282783 - DNA, 20 bp, synthetic construct
  source 1..20: mol_type = other DNA
ccactaggtgcgtaacggaa

SEQ ID NO: 282784 - DNA, 20 bp, synthetic construct
  source 1..20: mol_type = other DNA
gccactaggtgcgtaacgga

SEQ ID NO: 282785 - DNA, 20 bp, synthetic construct
  source 1..20: mol_type = other DNA
tgccactaggtgcgtaacgg

SEQ ID NO: 282786 - DNA, 20 bp, synthetic construct
  source 1..20: mol_type = other DNA
atgccactaggtgcgtaacg

SEQ ID NO: 282787 - DNA, 20 bp, synthetic construct
  source 1..20: mol_type = other DNA
aatgccactaggtgcgtaac

SEQ ID NO: 282788 - DNA, 20 bp, synthetic construct
  source 1..20: mol_type = other DNA
caatgccactaggtgcgtaa

SEQ ID NO: 282789 - DNA, 20 bp, synthetic construct
  source 1..20: mol_type = other DNA
acaatgccactaggtgcgta

SEQ ID NO: 282790 - DNA, 20 bp, synthetic construct
  source 1..20: mol_type = other DNA
cacaatgccactaggtgcgt

SEQ ID NO: 282791 - DNA, 20 bp, synthetic construct
  source 1..20: mol_type = other DNA
ccacaatgccactaggtgcg

SEQ ID NO: 282792 - DNA, 20 bp, synthetic construct
  source 1..20: mol_type = other DNA
cccacaatgccactaggtgc

SEQ ID NO: 282793 - DNA, 20 bp, synthetic construct
  source 1..20: mol_type = other DNA
acccacaatgccactaggtg

SEQ ID NO: 282794 - DNA, 20 bp, synthetic construct
  source 1..20: mol_type = other DNA
cacccacaatgccactaggt

SEQ ID NO: 282795 - DNA, 20 bp, synthetic construct
  source 1..20: mol_type = other DNA
ccacccacaatgccactagg

SEQ ID NO: 282796 - DNA, 20 bp, synthetic construct
  source 1..20: mol_type = other DNA
cccacccacaatgccactag

SEQ ID NO: 282797 - DNA, 20 bp, synthetic construct
  source 1..20: mol_type = other DNA
tcccacccacaatgccacta

SEQ ID NO: 282798 - DNA, 20 bp, synthetic construct
  source 1..20: mol_type = other DNA
ctcccacccacaatgccact

SEQ ID NO: 282799 - DNA, 20 bp, synthetic construct
  source 1..20: mol_type = other DNA
tctcccacccacaatgccac

SEQ ID NO: 282800 - DNA, 20 bp, synthetic construct
  source 1..20: mol_type = other DNA
ctctcccacccacaatgcca

SEQ ID NO: 282801 - DNA, 20 bp, synthetic construct
  source 1..20: mol_type = other DNA
cctctcccacccacaatgcc

SEQ ID NO: 282802 - DNA, 20 bp, synthetic construct
  source 1..20: mol_type = other DNA
ccctctcccacccacaatgc

SEQ ID NO: 282803 - DNA, 20 bp, synthetic construct
  source 1..20: mol_type = other DNA
gccctctcccacccacaatg

SEQ ID NO: 282804 - DNA, 20 bp, synthetic construct
  source 1..20: mol_type = other DNA
agccctctcccacccacaat

SEQ ID NO: 282805 - DNA, 20 bp, synthetic construct
  source 1..20: mol_type = other DNA
cagccctctcccacccacaa

SEQ ID NO: 282806 - DNA, 20 bp, synthetic construct
  source 1..20: mol_type = other DNA
ccagccctctcccacccaca

SEQ ID NO: 282807 - DNA, 20 bp, synthetic construct
  source 1..20: mol_type = other DNA
accagccctctcccacccac

SEQ ID NO: 282808 - DNA, 20 bp, synthetic construct
  source 1..20: mol_type = other DNA
caccagccctctcccaccca

SEQ ID NO: 282809 - DNA, 20 bp, synthetic construct
  source 1..20: mol_type = other DNA
ccaccagccctctcccaccc

SEQ ID NO: 282810 - DNA, 20 bp, synthetic construct
  source 1..20: mol_type = other DNA
cccaccagccctctcccacc

SEQ ID NO: 282811 - DNA, 20 bp, synthetic construct
  source 1..20: mol_type = other DNA
acccaccagccctctcccac

SEQ ID NO: 282812 - DNA, 20 bp, synthetic construct
  source 1..20: mol_type = other DNA
cacccaccagccctctccca

SEQ ID NO: 282813 - DNA, 20 bp, synthetic construct
  source 1..20: mol_type = other DNA
ccacccaccagccctctccc

SEQ ID NO: 282814 - DNA, 20 bp, synthetic construct
  source 1..20: mol_type = other DNA
tccacccaccagccctctcc

SEQ ID NO: 282815 - DNA, 20 bp, synthetic construct
  source 1..20: mol_type = other DNA
atccacccaccagccctctc

SEQ ID NO: 282816 - DNA, 20 bp, synthetic construct
  source 1..20: mol_type = other DNA
catccacccaccagccctct

SEQ ID NO: 282817 - DNA, 20 bp, synthetic construct
  source 1..20: mol_type = other DNA
ccatccacccaccagccctc

SEQ ID NO: 282818 - DNA, 20 bp, synthetic construct
  source 1..20: mol_type = other DNA
tccatccacccaccagccct

SEQ ID NO: 282819 - DNA, 20 bp, synthetic construct
  source 1..20: mol_type = other DNA
ttccatccacccaccagccc

SEQ ID NO: 282820 - DNA, 20 bp, synthetic construct
  source 1..20: mol_type = other DNA
cttccatccacccaccagcc

SEQ ID NO: 282821 - DNA, 20 bp, synthetic construct
  source 1..20: mol_type = other DNA
ccttccatccacccaccagc

SEQ ID NO: 282822 - DNA, 20 bp, synthetic construct
  source 1..20: mol_type = other DNA
tccttccatccacccaccag

SEQ ID NO: 282823 - DNA, 20 bp, synthetic construct
  source 1..20: mol_type = other DNA
ctccttccatccacccacca

SEQ ID NO: 282824 - DNA, 20 bp, synthetic construct
  source 1..20: mol_type = other DNA
tctccttccatccacccacc

SEQ ID NO: 282825 - DNA, 20 bp, synthetic construct
  source 1..20: mol_type = other DNA
ttctccttccatccacccac

SEQ ID NO: 282826 - DNA, 20 bp, synthetic construct
  source 1..20: mol_type = other DNA
cttctccttccatccaccca

SEQ ID NO: 282827 - DNA, 20 bp, synthetic construct
  source 1..20: mol_type = other DNA
ccttctccttccatccaccc

SEQ ID NO: 282828 - DNA, 20 bp, synthetic construct
  source 1..20: mol_type = other DNA
gccttctccttccatccacc

SEQ ID NO: 282829 - DNA, 20 bp, synthetic construct
  source 1..20: mol_type = other DNA
tgccttctccttccatccac

SEQ ID NO: 282830 - DNA, 20 bp, synthetic construct
  source 1..20: mol_type = other DNA
gtgccttctccttccatcca

SEQ ID NO: 282831 - DNA, 20 bp, synthetic construct
  source 1..20: mol_type = other DNA
tgtgccttctccttccatcc

SEQ ID NO: 282832 - DNA, 20 bp, synthetic construct
  source 1..20: mol_type = other DNA
ctgtgccttctccttccatc

SEQ ID NO: 282833 - DNA, 20 bp, synthetic construct
  source 1..20: mol_type = other DNA
gctgtgccttctccttccat

SEQ ID NO: 282834 - DNA, 20 bp, synthetic construct
  source 1..20: mol_type = other DNA
ggctgtgccttctccttcca

SEQ ID NO: 282835 - DNA, 20 bp, synthetic construct
  source 1..20: mol_type = other DNA
gggctgtgccttctccttcc

SEQ ID NO: 282836 - DNA, 20 bp, synthetic construct
  source 1..20: mol_type = other DNA
ggggctgtgccttctccttc

SEQ ID NO: 282837 - DNA, 20 bp, synthetic construct
  source 1..20: mol_type = other DNA
gggggctgtgccttctcctt

SEQ ID NO: 282838 - DNA, 20 bp, synthetic construct
  source 1..20: mol_type = other DNA
ggggggctgtgccttctcct

SEQ ID NO: 282839 - DNA, 20 bp, synthetic construct
  source 1..20: mol_type = other DNA
gggggggctgtgccttctcc

SEQ ID NO: 282840 - DNA, 20 bp, synthetic construct
  source 1..20: mol_type = other DNA
agggggggctgtgccttctc

SEQ ID NO: 282841 - DNA, 20 bp, synthetic construct
  source 1..20: mol_type = other DNA
aagggggggctgtgccttct

SEQ ID NO: 282842 - DNA, 20 bp, synthetic construct
  source 1..20: mol_type = other DNA
caagggggggctgtgccttc

SEQ ID NO: 282843 - DNA, 20 bp, synthetic construct
  source 1..20: mol_type = other DNA
gcaagggggggctgtgcctt

SEQ ID NO: 282844 - DNA, 20 bp, synthetic construct
  source 1..20: mol_type = other DNA
tgcaagggggggctgtgcct

SEQ ID NO: 282845 - DNA, 20 bp, synthetic construct
  source 1..20: mol_type = other DNA
ctgcaagggggggctgtgcc

SEQ ID NO: 282846 - DNA, 20 bp, synthetic construct
  source 1..20: mol_type = other DNA
cctgcaagggggggctgtgc

SEQ ID NO: 282847 - DNA, 20 bp, synthetic construct
  source 1..20: mol_type = other DNA
ccctgcaagggggggctgtg

SEQ ID NO: 282848 - DNA, 20 bp, synthetic construct
  source 1..20: mol_type = other DNA
tccctgcaagggggggctgt

SEQ ID NO: 282849 - DNA, 20 bp, synthetic construct
  source 1..20: mol_type = other DNA
gtccctgcaagggggggctg

SEQ ID NO: 282850 - DNA, 20 bp, synthetic construct
  source 1..20: mol_type = other DNA
tgtccctgcaagggggggct

SEQ ID NO: 282851 - DNA, 20 bp, synthetic construct
  source 1..20: mol_type = other DNA
ctgtccctgcaagggggggc

SEQ ID NO: 282852 - DNA, 20 bp, synthetic construct
  source 1..20: mol_type = other DNA
tctgtccctgcaaggggggg

SEQ ID NO: 282853 - DNA, 20 bp, synthetic construct
  source 1..20: mol_type = other DNA
ctctgtccctgcaagggggg

SEQ ID NO: 282854 - DNA, 20 bp, synthetic construct
  source 1..20: mol_type = other DNA
gctctgtccctgcaaggggg

SEQ ID NO: 282855 - DNA, 20 bp, synthetic construct
  source 1..20: mol_type = other DNA
ggctctgtccctgcaagggg

SEQ ID NO: 282856 - DNA, 20 bp, synthetic construct
  source 1..20: mol_type = other DNA
gggctctgtccctgcaaggg

SEQ ID NO: 282857 - DNA, 20 bp, synthetic construct
  source 1..20: mol_type = other DNA
agggctctgtccctgcaagg

SEQ ID NO: 282858 - DNA, 20 bp, synthetic construct
  source 1..20: mol_type = other DNA
gagggctctgtccctgcaag

SEQ ID NO: 282859 - DNA, 20 bp, synthetic construct
  source 1..20: mol_type = other DNA
cgagggctctgtccctgcaa

SEQ ID NO: 282860 - DNA, 20 bp, synthetic construct
  source 1..20: mol_type = other DNA
acgagggctctgtccctgca

SEQ ID NO: 282861 - DNA, 20 bp, synthetic construct
  source 1..20: mol_type = other DNA
tacgagggctctgtccctgc

SEQ ID NO: 282862 - DNA, 20 bp, synthetic construct
  source 1..20: mol_type = other DNA
gtacgagggctctgtccctg

SEQ ID NO: 282863 - DNA, 20 bp, synthetic construct
  source 1..20: mol_type = other DNA
tgtacgagggctctgtccct

SEQ ID NO: 282864 - DNA, 20 bp, synthetic construct
  source 1..20: mol_type = other DNA
ctgtacgagggctctgtccc

SEQ ID NO: 282865 - DNA, 20 bp, synthetic construct
  source 1..20: mol_type = other DNA
tctgtacgagggctctgtcc

SEQ ID NO: 282866 - DNA, 20 bp, synthetic construct
  source 1..20: mol_type = other DNA
ttctgtacgagggctctgtc

SEQ ID NO: 282867 - DNA, 20 bp, synthetic construct
  source 1..20: mol_type = other DNA
cttctgtacgagggctctgt

SEQ ID NO: 282868 - DNA, 20 bp, synthetic construct
  source 1..20: mol_type = other DNA
ccttctgtacgagggctctg

SEQ ID NO: 282869 - DNA, 20 bp, synthetic construct
  source 1..20: mol_type = other DNA
cccttctgtacgagggctct

SEQ ID NO: 282870 - DNA, 20 bp, synthetic construct
  source 1..20: mol_type = other DNA
tcccttctgtacgagggctc

SEQ ID NO: 282871 - DNA, 20 bp, synthetic construct
  source 1..20: mol_type = other DNA
gtcccttctgtacgagggct

SEQ ID NO: 282872 - DNA, 20 bp, synthetic construct
  source 1..20: mol_type = other DNA
tgtcccttctgtacgagggc

SEQ ID NO: 282873 - DNA, 20 bp, synthetic construct
  source 1..20: mol_type = other DNA
gtgtcccttctgtacgaggg

SEQ ID NO: 282874 - DNA, 20 bp, synthetic construct
  source 1..20: mol_type = other DNA
ggtgtcccttctgtacgagg

SEQ ID NO: 282875 - DNA, 20 bp, synthetic construct
  source 1..20: mol_type = other DNA
gggtgtcccttctgtacgag

SEQ ID NO: 282876 - DNA, 20 bp, synthetic construct
  source 1..20: mol_type = other DNA
ggggtgtcccttctgtacga

SEQ ID NO: 282877 - DNA, 20 bp, synthetic construct
  source 1..20: mol_type = other DNA
tggggtgtcccttctgtacg

SEQ ID NO: 282878 - DNA, 20 bp, synthetic construct
  source 1..20: mol_type = other DNA
gtggggtgtcccttctgtac

SEQ ID NO: 282879 - DNA, 20 bp, synthetic construct
  source 1..20: mol_type = other DNA
tgtggggtgtcccttctgta

SEQ ID NO: 282880 - DNA, 20 bp, synthetic construct
  source 1..20: mol_type = other DNA
atgtggggtgtcccttctgt

SEQ ID NO: 282881 - DNA, 20 bp, synthetic construct
  source 1..20: mol_type = other DNA
aatgtggggtgtcccttctg

SEQ ID NO: 282882 - DNA, 20 bp, synthetic construct
  source 1..20: mol_type = other DNA
aaatgtggggtgtcccttct

SEQ ID NO: 282883 - DNA, 20 bp, synthetic construct
  source 1..20: mol_type = other DNA
caaatgtggggtgtcccttc

SEQ ID NO: 282884 - DNA, 20 bp, synthetic construct
  source 1..20: mol_type = other DNA
acaaatgtggggtgtccctt

SEQ ID NO: 282885 - DNA, 20 bp, synthetic construct
  source 1..20: mol_type = other DNA
gacaaatgtggggtgtccct

SEQ ID NO: 282886 - DNA, 20 bp, synthetic construct
  source 1..20: mol_type = other DNA
agacaaatgtggggtgtccc

SEQ ID NO: 282887 - DNA, 20 bp, synthetic construct
  source 1..20: mol_type = other DNA
aagacaaatgtggggtgtcc

SEQ ID NO: 282888 - DNA, 20 bp, synthetic construct
  source 1..20: mol_type = other DNA
gaagacaaatgtggggtgtc

SEQ ID NO: 282889 - DNA, 20 bp, synthetic construct
  source 1..20: mol_type = other DNA
ggaagacaaatgtggggtgt

SEQ ID NO: 282890 - DNA, 20 bp, synthetic construct
  source 1..20: mol_type = other DNA
gggaagacaaatgtggggtg

SEQ ID NO: 282891 - DNA, 20 bp, synthetic construct
  source 1..20: mol_type = other DNA
ggggaagacaaatgtggggt

SEQ ID NO: 282892 - DNA, 20 bp, synthetic construct
  source 1..20: mol_type = other DNA
tggggaagacaaatgtgggg

SEQ ID NO: 282893 - DNA, 20 bp, synthetic construct
  source 1..20: mol_type = other DNA
gtggggaagacaaatgtggg

SEQ ID NO: 282894 - DNA, 20 bp, synthetic construct
  source 1..20: mol_type = other DNA
tgtggggaagacaaatgtgg

SEQ ID NO: 282895 - DNA, 20 bp, synthetic construct
  source 1..20: mol_type = other DNA
ttgtggggaagacaaatgtg

SEQ ID NO: 282896 - DNA, 20 bp, synthetic construct
  source 1..20: mol_type = other DNA
tttgtggggaagacaaatgt

SEQ ID NO: 282897 - DNA, 20 bp, synthetic construct
  source 1..20: mol_type = other DNA
ctttgtggggaagacaaatg

SEQ ID NO: 282898 - DNA, 20 bp, synthetic construct
  source 1..20: mol_type = other DNA
gctttgtggggaagacaaat

SEQ ID NO: 282899 - DNA, 20 bp, synthetic construct
  source 1..20: mol_type = other DNA
cgctttgtggggaagacaaa

SEQ ID NO: 282900 - DNA, 20 bp, synthetic construct
  source 1..20: mol_type = other DNA
ccgctttgtggggaagacaa

SEQ ID NO: 282901 - DNA, 20 bp, synthetic construct
  source 1..20: mol_type = other DNA
gccgctttgtggggaagaca

SEQ ID NO: 282902 - DNA, 20 bp, synthetic construct
  source 1..20: mol_type = other DNA
ggccgctttgtggggaagac

SEQ ID NO: 282903 - DNA, 20 bp, synthetic construct
  source 1..20: mol_type = other DNA
aggccgctttgtggggaaga

SEQ ID NO: 282904 - DNA, 20 bp, synthetic construct
  source 1..20: mol_type = other DNA
caggccgctttgtggggaag

SEQ ID NO: 282905 - DNA, 20 bp, synthetic construct
  source 1..20: mol_type = other DNA
acaggccgctttgtggggaa

SEQ ID NO: 282906 - DNA, 20 bp, synthetic construct
  source 1..20: mol_type = other DNA
cacaggccgctttgtgggga

SEQ ID NO: 282907 - DNA, 20 bp, synthetic construct
  source 1..20: mol_type = other DNA
acacaggccgctttgtgggg

SEQ ID NO: 282908 - DNA, 20 bp, synthetic construct
  source 1..20: mol_type = other DNA
gacacaggccgctttgtggg

SEQ ID NO: 282909 - DNA, 20 bp, synthetic construct
  source 1..20: mol_type = other DNA
ggacacaggccgctttgtgg

SEQ ID NO: 282910 - DNA, 20 bp, synthetic construct
  source 1..20: mol_type = other DNA
aggacacaggccgctttgtg

SEQ ID NO: 282911 - DNA, 20 bp, synthetic construct
  source 1..20: mol_type = other DNA
caggacacaggccgctttgt

SEQ ID NO: 282912 - DNA, 20 bp, synthetic construct
  source 1..20: mol_type = other DNA
gcaggacacaggccgctttg

SEQ ID NO: 282913 - DNA, 20 bp, synthetic construct
  source 1..20: mol_type = other DNA
ggcaggacacaggccgcttt

SEQ ID NO: 282914 - DNA, 20 bp, synthetic construct
  source 1..20: mol_type = other DNA
aggcaggacacaggccgctt

SEQ ID NO: 282915 - DNA, 20 bp, synthetic construct
  source 1..20: mol_type = other DNA
taggcaggacacaggccgct

SEQ ID NO: 282916 - DNA, 20 bp, synthetic construct
  source 1..20: mol_type = other DNA
gtaggcaggacacaggccgc

SEQ ID NO: 282917 - DNA, 20 bp, synthetic construct
  source 1..20: mol_type = other DNA
cgtaggcaggacacaggccg

SEQ ID NO: 282918 - DNA, 20 bp, synthetic construct
  source 1..20: mol_type = other DNA
ccgtaggcaggacacaggcc

SEQ ID NO: 282919 - DNA, 20 bp, synthetic construct
  source 1..20: mol_type = other DNA
cccgtaggcaggacacaggc

SEQ ID NO: 282920 - DNA, 20 bp, synthetic construct
  source 1..20: mol_type = other DNA
ccccgtaggcaggacacagg

SEQ ID NO: 282921 - DNA, 20 bp, synthetic construct
  source 1..20: mol_type = other DNA
accccgtaggcaggacacag

SEQ ID NO: 282922 - DNA, 20 bp, synthetic construct
  source 1..20: mol_type = other DNA
gaccccgtaggcaggacaca

SEQ ID NO: 282923 - DNA, 20 bp, synthetic construct
  source 1..20: mol_type = other DNA
tgaccccgtaggcaggacac

SEQ ID NO: 282924 - DNA, 20 bp, synthetic construct
  source 1..20: mol_type = other DNA
ctgaccccgtaggcaggaca

SEQ ID NO: 282925 - DNA, 20 bp, synthetic construct
  source 1..20: mol_type = other DNA
cctgaccccgtaggcaggac

SEQ ID NO: 282926 - DNA, 20 bp, synthetic construct
  source 1..20: mol_type = other DNA
ccctgaccccgtaggcagga

SEQ ID NO: 282927 - DNA, 20 bp, synthetic construct
  source 1..20: mol_type = other DNA
gccctgaccccgtaggcagg

SEQ ID NO: 282928 - DNA, 20 bp, synthetic construct
  source 1..20: mol_type = other DNA
agccctgaccccgtaggcag

SEQ ID NO: 282929 - DNA, 20 bp, synthetic construct
  source 1..20: mol_type = other DNA
aagccctgaccccgtaggca

SEQ ID NO: 282930 - DNA, 20 bp, synthetic construct
  source 1..20: mol_type = other DNA
gaagccctgaccccgtaggc

SEQ ID NO: 282931 - DNA, 20 bp, synthetic construct
  source 1..20: mol_type = other DNA
agaagccctgaccccgtagg

SEQ ID NO: 282932 - DNA, 20 bp, synthetic construct
  source 1..20: mol_type = other DNA
gagaagccctgaccccgtag

SEQ ID NO: 282933 - DNA, 20 bp, synthetic construct
  source 1..20: mol_type = other DNA
tgagaagccctgaccccgta

SEQ ID NO: 282934 - DNA, 20 bp, synthetic construct
  source 1..20: mol_type = other DNA
ttgagaagccctgaccccgt

SEQ ID NO: 282935 - DNA, 20 bp, synthetic construct
  source 1..20: mol_type = other DNA
tttgagaagccctgaccccg

SEQ ID NO: 282936 - DNA, 20 bp, synthetic construct
  source 1..20: mol_type = other DNA
gtttgagaagccctgacccc

SEQ ID NO: 282937 - DNA, 20 bp, synthetic construct
  source 1..20: mol_type = other DNA
ggtttgagaagccctgaccc

SEQ ID NO: 282938 - DNA, 20 bp, synthetic construct
  source 1..20: mol_type = other DNA
aggtttgagaagccctgacc

SEQ ID NO: 282939 - DNA, 20 bp, synthetic construct
  source 1..20: mol_type = other DNA
caggtttgagaagccctgac

SEQ ID NO: 282940 - DNA, 20 bp, synthetic construct
  source 1..20: mol_type = other DNA
ccaggtttgagaagccctga

SEQ ID NO: 282941 - DNA, 20 bp, synthetic construct
  source 1..20: mol_type = other DNA
gccaggtttgagaagccctg

SEQ ID NO: 282942 - DNA, 20 bp, synthetic construct
  source 1..20: mol_type = other DNA
agccaggtttgagaagccct

SEQ ID NO: 282943 - DNA, 20 bp, synthetic construct
  source 1..20: mol_type = other DNA
cagccaggtttgagaagccc

SEQ ID NO: 282944 - DNA, 20 bp, synthetic construct
  source 1..20: mol_type = other DNA
acagccaggtttgagaagcc

SEQ ID NO: 282945 - DNA, 20 bp, synthetic construct
  source 1..20: mol_type = other DNA
cacagccaggtttgagaagc

SEQ ID NO: 282946 - DNA, 20 bp, synthetic construct
  source 1..20: mol_type = other DNA
acacagccaggtttgagaag

SEQ ID NO: 282947 - DNA, 20 bp, synthetic construct
  source 1..20: mol_type = other DNA
cacacagccaggtttgagaa

SEQ ID NO: 282948 - DNA, 20 bp, synthetic construct
  source 1..20: mol_type = other DNA
acacacagccaggtttgaga

SEQ ID NO: 282949 - DNA, 20 bp, synthetic construct
  source 1..20: mol_type = other DNA
gacacacagccaggtttgag

SEQ ID NO: 282950 - DNA, 20 bp, synthetic construct
  source 1..20: mol_type = other DNA
tgacacacagccaggtttga

SEQ ID NO: 282951 - DNA, 20 bp, synthetic construct
  source 1..20: mol_type = other DNA
ctgacacacagccaggtttg

SEQ ID NO: 282952 - DNA, 20 bp, synthetic construct
  source 1..20: mol_type = other DNA
tctgacacacagccaggttt

SEQ ID NO: 282953 - DNA, 20 bp, synthetic construct
  source 1..20: mol_type = other DNA
ttctgacacacagccaggtt

SEQ ID NO: 282954 - DNA, 20 bp, synthetic construct
  source 1..20: mol_type = other DNA
attctgacacacagccaggt

SEQ ID NO: 282955 - DNA, 20 bp, synthetic construct
  source 1..20: mol_type = other DNA
gattctgacacacagccagg

SEQ ID NO: 282956 - DNA, 20 bp, synthetic construct
  source 1..20: mol_type = other DNA
tgattctgacacacagccag

SEQ ID NO: 282957 - DNA, 20 bp, synthetic construct
  source 1..20: mol_type = other DNA
gtgattctgacacacagcca

SEQ ID NO: 282958 - DNA, 20 bp, synthetic construct
  source 1..20: mol_type = other DNA
ggtgattctgacacacagcc

SEQ ID NO: 282959 - DNA, 20 bp, synthetic construct
  source 1..20: mol_type = other DNA
tggtgattctgacacacagc

SEQ ID NO: 282960 - DNA, 20 bp, synthetic construct
  source 1..20: mol_type = other DNA
ctggtgattctgacacacag

SEQ ID NO: 282961 - DNA, 20 bp, synthetic construct
  source 1..20: mol_type = other DNA
cctggtgattctgacacaca

SEQ ID NO: 282962 - DNA, 20 bp, synthetic construct
  source 1..20: mol_type = other DNA
ccctggtgattctgacacac

SEQ ID NO: 282963 - DNA, 20 bp, synthetic construct
  source 1..20: mol_type = other DNA
cccctggtgattctgacaca

SEQ ID NO: 282964 - DNA, 20 bp, synthetic construct
  source 1..20: mol_type = other DNA
tcccctggtgattctgacac

SEQ ID NO: 282965 - DNA, 20 bp, synthetic construct
  source 1..20: mol_type = other DNA
ttcccctggtgattctgaca

SEQ ID NO: 282966 - DNA, 20 bp, synthetic construct
  source 1..20: mol_type = other DNA
gttcccctggtgattctgac

SEQ ID NO: 282967 - DNA, 20 bp, synthetic construct
  source 1..20: mol_type = other DNA
agttcccctggtgattctga

SEQ ID NO: 282968 - DNA, 20 bp, synthetic construct
  source 1..20: mol_type = other DNA
aagttcccctggtgattctg

SEQ ID NO: 282969 - DNA, 20 bp, synthetic construct
  source 1..20: mol_type = other DNA
aaagttcccctggtgattct

SEQ ID NO: 282970 - DNA, 20 bp, synthetic construct
  source 1..20: mol_type = other DNA
aaaagttcccctggtgattc

SEQ ID NO: 282971 - DNA, 20 bp, synthetic construct
  source 1..20: mol_type = other DNA
gaaaagttcccctggtgatt

SEQ ID NO: 282972 - DNA, 20 bp, synthetic construct
  source 1..20: mol_type = other DNA
tgaaaagttcccctggtgat

SEQ ID NO: 282973 - DNA, 20 bp, synthetic construct
  source 1..20: mol_type = other DNA
ttgaaaagttcccctggtga

SEQ ID NO: 282974 - DNA, 20 bp, synthetic construct
  source 1..20: mol_type = other DNA
tttgaaaagttcccctggtg

SEQ ID NO: 282975 - DNA, 20 bp, synthetic construct
  source 1..20: mol_type = other DNA
ttttgaaaagttcccctggt

SEQ ID NO: 282976 - DNA, 20 bp, synthetic construct
  source 1..20: mol_type = other DNA
gttttgaaaagttcccctgg

SEQ ID NO: 282977 - DNA, 20 bp, synthetic construct
  source 1..20: mol_type = other DNA
agttttgaaaagttcccctg

SEQ ID NO: 282978 - DNA, 20 bp, synthetic construct
  source 1..20: mol_type = other DNA
tagttttgaaaagttcccct

SEQ ID NO: 282979 - DNA, 20 bp, synthetic construct
  source 1..20: mol_type = other DNA
ctagttttgaaaagttcccc

SEQ ID NO: 282980 - DNA, 20 bp, synthetic construct
  source 1..20: mol_type = other DNA
tctagttttgaaaagttccc

SEQ ID NO: 282981 - DNA, 20 bp, synthetic construct
  source 1..20: mol_type = other DNA
ctctagttttgaaaagttcc

SEQ ID NO: 282982 - DNA, 20 bp, synthetic construct
  source 1..20: mol_type = other DNA
tctctagttttgaaaagttc

SEQ ID NO: 282983 - DNA, 20 bp, synthetic construct
  source 1..20: mol_type = other DNA
ctctctagttttgaaaagtt

SEQ ID NO: 282984 - DNA, 20 bp, synthetic construct
  source 1..20: mol_type = other DNA
tctctctagttttgaaaagt

SEQ ID NO: 282985 - DNA, 20 bp, synthetic construct
  source 1..20: mol_type = other DNA
gtctctctagttttgaaaag

SEQ ID NO: 282986 - DNA, 20 bp, synthetic construct
  source 1..20: mol_type = other DNA
agtctctctagttttgaaaa

SEQ ID NO: 282987 - DNA, 20 bp, synthetic construct
  source 1..20: mol_type = other DNA
cagtctctctagttttgaaa

SEQ ID NO: 282988 - DNA, 20 bp, synthetic construct
  source 1..20: mol_type = other DNA
tcagtctctctagttttgaa

SEQ ID NO: 282989 - DNA, 20 bp, synthetic construct
  source 1..20: mol_type = other DNA
ttcagtctctctagttttga

SEQ ID NO: 282990 - DNA, 20 bp, synthetic construct
  source 1..20: mol_type = other DNA
cttcagtctctctagttttg

SEQ ID NO: 282991 - DNA, 20 bp, synthetic construct
  source 1..20: mol_type = other DNA
gcttcagtctctctagtttt

SEQ ID NO: 282992 - DNA, 20 bp, synthetic construct
  source 1..20: mol_type = other DNA
ggcttcagtctctctagttt

SEQ ID NO: 282993 - DNA, 20 bp, synthetic construct
  source 1..20: mol_type = other DNA
tggcttcagtctctctagtt

SEQ ID NO: 282994 - DNA, 20 bp, synthetic construct
  source 1..20: mol_type = other DNA
ctggcttcagtctctctagt

SEQ ID NO: 282995 - DNA, 20 bp, synthetic construct
  source 1..20: mol_type = other DNA
tctggcttcagtctctctag

SEQ ID NO: 282996 - DNA, 20 bp, synthetic construct
  source 1..20: mol_type = other DNA
gtctggcttcagtctctcta

SEQ ID NO: 282997 - DNA, 20 bp, synthetic construct
  source 1..20: mol_type = other DNA
agtctggcttcagtctctct

SEQ ID NO: 282998 - DNA, 20 bp, synthetic construct
  source 1..20: mol_type = other DNA
gagtctggcttcagtctctc

SEQ ID NO: 282999 - DNA, 20 bp, synthetic construct
  source 1..20: mol_type = other DNA
ggagtctggcttcagtctct

SEQ ID NO: 283000 - DNA, 20 bp, synthetic construct
  source 1..20: mol_type = other DNA
aggagtctggcttcagtctc

SEQ ID NO: 283001 - DNA, 20 bp, synthetic construct
  source 1..20: mol_type = other DNA
taggagtctggcttcagtct

SEQ ID NO: 283002 - DNA, 20 bp, synthetic construct
  source 1..20: mol_type = other DNA
ctaggagtctggcttcagtc

SEQ ID NO: 283003 - DNA, 20 bp, synthetic construct
  source 1..20: mol_type = other DNA
tctaggagtctggcttcagt

SEQ ID NO: 283004 - DNA, 20 bp, synthetic construct
  source 1..20: mol_type = other DNA
atctaggagtctggcttcag

SEQ ID NO: 283005 - DNA, 20 bp, synthetic construct
  source 1..20: mol_type = other DNA
aatctaggagtctggcttca

SEQ ID NO: 283006 - DNA, 20 bp, synthetic construct
  source 1..20: mol_type = other DNA
gaatctaggagtctggcttc

SEQ ID NO: 283007 - DNA, 20 bp, synthetic construct
  source 1..20: mol_type = other DNA
agaatctaggagtctggctt

SEQ ID NO: 283008 - DNA, 20 bp, synthetic construct
  source 1..20: mol_type = other DNA
tagaatctaggagtctggct

SEQ ID NO: 283009 - DNA, 20 bp, synthetic construct
  source 1..20: mol_type = other DNA
ttagaatctaggagtctggc

SEQ ID NO: 283010 - DNA, 20 bp, synthetic construct
  source 1..20: mol_type = other DNA
attagaatctaggagtctgg

SEQ ID NO: 283011 - DNA, 20 bp, synthetic construct
  source 1..20: mol_type = other DNA
aattagaatctaggagtctg

SEQ ID NO: 283012 - DNA, 20 bp, synthetic construct
  source 1..20: mol_type = other DNA
gaattagaatctaggagtct

SEQ ID NO: 283013 - DNA, 20 bp, synthetic construct
  source 1..20: mol_type = other DNA
agaattagaatctaggagtc

SEQ ID NO: 283014 - DNA, 20 bp, synthetic construct
  source 1..20: mol_type = other DNA
tagaattagaatctaggagt

SEQ ID NO: 283015 - DNA, 20 bp, synthetic construct
  source 1..20: mol_type = other DNA
ctagaattagaatctaggag

SEQ ID NO: 283016 - DNA, 20 bp, synthetic construct
  source 1..20: mol_type = other DNA
cctagaattagaatctagga

SEQ ID NO: 283017 - DNA, 20 bp, synthetic construct
  source 1..20: mol_type = other DNA
acctagaattagaatctagg

SEQ ID NO: 283018 - DNA, 20 bp, synthetic construct
  source 1..20: mol_type = other DNA
gacctagaattagaatctag

SEQ ID NO: 283019 - DNA, 20 bp, synthetic construct
  source 1..20: mol_type = other DNA
tgacctagaattagaatcta

SEQ ID NO: 283020 - DNA, 20 bp, synthetic construct
  source 1..20: mol_type = other DNA
ctgacctagaattagaatct

SEQ ID NO: 283021 - DNA, 20 bp, synthetic construct
  source 1..20: mol_type = other DNA
cctgacctagaattagaatc

SEQ ID NO: 283022 - DNA, 20 bp, synthetic construct
  source 1..20: mol_type = other DNA
ccctgacctagaattagaat

SEQ ID NO: 283023 - DNA, 20 bp, synthetic construct
  source 1..20: mol_type = other DNA
gccctgacctagaattagaa

SEQ ID NO: 283024 - DNA, 20 bp, synthetic construct
  source 1..20: mol_type = other DNA
agccctgacctagaattaga

SEQ ID NO: 283025 - DNA, 20 bp, synthetic construct
  source 1..20: mol_type = other DNA
tagccctgacctagaattag

SEQ ID NO: 283026 - DNA, 20 bp, synthetic construct
  source 1..20: mol_type = other DNA
ctagccctgacctagaatta

SEQ ID NO: 283027 - DNA, 20 bp, synthetic construct
  source 1..20: mol_type = other DNA
cctagccctgacctagaatt

SEQ ID NO: 283028 - DNA, 20 bp, synthetic construct
  source 1..20: mol_type = other DNA
ccctagccctgacctagaat

SEQ ID NO: 283029 - DNA, 20 bp, synthetic construct
  source 1..20: mol_type = other DNA
cccctagccctgacctagaa

SEQ ID NO: 283030 - DNA, 20 bp, synthetic construct
  source 1..20: mol_type = other DNA
gcccctagccctgacctaga

SEQ ID NO: 283031 - DNA, 20 bp, synthetic construct
  source 1..20: mol_type = other DNA
agcccctagccctgacctag

SEQ ID NO: 283032 - DNA, 20 bp, synthetic construct
  source 1..20: mol_type = other DNA
cagcccctagccctgaccta

SEQ ID NO: 283033 - DNA, 20 bp, synthetic construct
  source 1..20: mol_type = other DNA
tcagcccctagccctgacct

SEQ ID NO: 283034 - DNA, 20 bp, synthetic construct
  source 1..20: mol_type = other DNA
ctcagcccctagccctgacc

SEQ ID NO: 283035 - DNA, 20 bp, synthetic construct
  source 1..20: mol_type = other DNA
tctcagcccctagccctgac

SEQ ID NO: 283036 - DNA, 20 bp, synthetic construct
  source 1..20: mol_type = other DNA
atctcagcccctagccctga

SEQ ID NO: 283037 - DNA, 20 bp, synthetic construct
  source 1..20: mol_type = other DNA
aatctcagcccctagccctg

SEQ ID NO: 283038 - DNA, 20 bp, synthetic construct
  source 1..20: mol_type = other DNA
caatctcagcccctagccct

SEQ ID NO: 283039 - DNA, 20 bp, synthetic construct
  source 1..20: mol_type = other DNA
acaatctcagcccctagccc

SEQ ID NO: 283040 - DNA, 20 bp, synthetic construct
  source 1..20: mol_type = other DNA
tacaatctcagcccctagcc

SEQ ID NO: 283041 - DNA, 20 bp, synthetic construct
  source 1..20: mol_type = other DNA
ttacaatctcagcccctagc

SEQ ID NO: 283042 - DNA, 20 bp, synthetic construct
  source 1..20: mol_type = other DNA
tttacaatctcagcccctag

SEQ ID NO: 283043 - DNA, 20 bp, synthetic construct
  source 1..20: mol_type = other DNA
ttttacaatctcagccccta

SEQ ID NO: 283044 - DNA, 20 bp, synthetic construct
  source 1..20: mol_type = other DNA
tttttacaatctcagcccct

SEQ ID NO: 283045 - DNA, 20 bp, synthetic construct
  source 1..20: mol_type = other DNA
atttttacaatctcagcccc

SEQ ID NO: 283046 - DNA, 20 bp, synthetic construct
  source 1..20: mol_type = other DNA
gatttttacaatctcagccc

SEQ ID NO: 283047 - DNA, 20 bp, synthetic construct
  source 1..20: mol_type = other DNA
ggatttttacaatctcagcc

SEQ ID NO: 283048 - DNA, 20 bp, synthetic construct
  source 1..20: mol_type = other DNA
tggatttttacaatctcagc

SEQ ID NO: 283049 - DNA, 20 bp, synthetic construct
  source 1..20: mol_type = other DNA
gtggatttttacaatctcag

SEQ ID NO: 283050 - DNA, 20 bp, synthetic construct
  source 1..20: mol_type = other DNA
tgtggatttttacaatctca

SEQ ID NO: 283051 - DNA, 20 bp, synthetic construct
  source 1..20: mol_type = other DNA
ctgtggatttttacaatctc

SEQ ID NO: 283052 - DNA, 20 bp, synthetic construct
  source 1..20: mol_type = other DNA
cctgtggatttttacaatct

SEQ ID NO: 283053 - DNA, 20 bp, synthetic construct
  source 1..20: mol_type = other DNA
acctgtggatttttacaatc

SEQ ID NO: 283054 - DNA, 20 bp, synthetic construct
  source 1..20: mol_type = other DNA
cacctgtggatttttacaat

SEQ ID NO: 283055 - DNA, 20 bp, synthetic construct
  source 1..20: mol_type = other DNA
tcacctgtggatttttacaa

SEQ ID NO: 283056 - DNA, 20 bp, synthetic construct
  source 1..20: mol_type = other DNA
atcacctgtggatttttaca

SEQ ID NO: 283057 - DNA, 20 bp, synthetic construct
  source 1..20: mol_type = other DNA
aatcacctgtggatttttac

SEQ ID NO: 283058 - DNA, 20 bp, synthetic construct
  source 1..20: mol_type = other DNA
gaatcacctgtggattttta

SEQ ID NO: 283059 - DNA, 20 bp, synthetic construct
  source 1..20: mol_type = other DNA
agaatcacctgtggattttt

SEQ ID NO: 283060 - DNA, 20 bp, synthetic construct
  source 1..20: mol_type = other DNA
cagaatcacctgtggatttt

SEQ ID NO: 283061 - DNA, 20 bp, synthetic construct
  source 1..20: mol_type = other DNA
tcagaatcacctgtggattt

SEQ ID NO: 283062 - DNA, 20 bp, synthetic construct
  source 1..20: mol_type = other DNA
atcagaatcacctgtggatt

SEQ ID NO: 283063 - DNA, 20 bp, synthetic construct
  source 1..20: mol_type = other DNA
catcagaatcacctgtggat

SEQ ID NO: 283064 - DNA, 20 bp, synthetic construct
  source 1..20: mol_type = other DNA
gcatcagaatcacctgtgga

SEQ ID NO: 283065 - DNA, 20 bp, synthetic construct
  source 1..20: mol_type = other DNA
ggcatcagaatcacctgtgg

SEQ ID NO: 283066 - DNA, 20 bp, synthetic construct
  source 1..20: mol_type = other DNA
gggcatcagaatcacctgtg

SEQ ID NO: 283067 - DNA, 20 bp, synthetic construct
  source 1..20: mol_type = other DNA
cgggcatcagaatcacctgt

SEQ ID NO: 283068 - DNA, 20 bp, synthetic construct
  source 1..20: mol_type = other DNA
ccgggcatcagaatcacctg

SEQ ID NO: 283069 - DNA, 20 bp, synthetic construct
  source 1..20: mol_type = other DNA
gccgggcatcagaatcacct

SEQ ID NO: 283070 - DNA, 20 bp, synthetic construct
  source 1..20: mol_type = other DNA
tgccgggcatcagaatcacc

SEQ ID NO: 283071 - DNA, 20 bp, synthetic construct
  source 1..20: mol_type = other DNA
ctgccgggcatcagaatcac

SEQ ID NO: 283072 - DNA, 20 bp, synthetic construct
  source 1..20: mol_type = other DNA
cctgccgggcatcagaatca

SEQ ID NO: 283073 - DNA, 20 bp, synthetic construct
  source 1..20: mol_type = other DNA
gcctgccgggcatcagaatc

SEQ ID NO: 283074 - DNA, 20 bp, synthetic construct
  source 1..20: mol_type = other DNA
agcctgccgggcatcagaat

SEQ ID NO: 283075 - DNA, 20 bp, synthetic construct
  source 1..20: mol_type = other DNA
aagcctgccgggcatcagaa

SEQ ID NO: 283076 - DNA, 20 bp, synthetic construct
  source 1..20: mol_type = other DNA
caagcctgccgggcatcaga

SEQ ID NO: 283077 - DNA, 20 bp, synthetic construct
  source 1..20: mol_type = other DNA
tcaagcctgccgggcatcag

SEQ ID NO: 283078 - DNA, 20 bp, synthetic construct
  source 1..20: mol_type = other DNA
ctcaagcctgccgggcatca

SEQ ID NO: 283079 - DNA, 20 bp, synthetic construct
  source 1..20: mol_type = other DNA
tctcaagcctgccgggcatc

SEQ ID NO: 283080 - DNA, 20 bp, synthetic construct
  source 1..20: mol_type = other DNA
ttctcaagcctgccgggcat

SEQ ID NO: 283081 - DNA, 20 bp, synthetic construct
  source 1..20: mol_type = other DNA
gttctcaagcctgccgggca

SEQ ID NO: 283082 - DNA, 20 bp, synthetic construct
  source 1..20: mol_type = other DNA
tgttctcaagcctgccgggc

SEQ ID NO: 283083 - DNA, 20 bp, synthetic construct
  source 1..20: mol_type = other DNA
ctgttctcaagcctgccggg

SEQ ID NO: 283084 - DNA, 20 bp, synthetic construct
  source 1..20: mol_type = other DNA
gctgttctcaagcctgccgg

SEQ ID NO: 283085 - DNA, 20 bp, synthetic construct
  source 1..20: mol_type = other DNA
ggctgttctcaagcctgccg

SEQ ID NO: 283086 - DNA, 20 bp, synthetic construct
  source 1..20: mol_type = other DNA
cggctgttctcaagcctgcc

SEQ ID NO: 283087 - DNA, 20 bp, synthetic construct
  source 1..20: mol_type = other DNA
gcggctgttctcaagcctgc

SEQ ID NO: 283088 - DNA, 20 bp, synthetic construct
  source 1..20: mol_type = other DNA
tgcggctgttctcaagcctg

SEQ ID NO: 283089 - DNA, 20 bp, synthetic construct
  source 1..20: mol_type = other DNA
ctgcggctgttctcaagcct

SEQ ID NO: 283090 - DNA, 20 bp, synthetic construct
  source 1..20: mol_type = other DNA
cctgcggctgttctcaagcc

SEQ ID NO: 283091 - DNA, 20 bp, synthetic construct
  source 1..20: mol_type = other DNA
ccctgcggctgttctcaagc

SEQ ID NO: 283092 - DNA, 20 bp, synthetic construct
  source 1..20: mol_type = other DNA
tccctgcggctgttctcaag

SEQ ID NO: 283093 - DNA, 20 bp, synthetic construct
  source 1..20: mol_type = other DNA
ctccctgcggctgttctcaa

SEQ ID NO: 283094 - DNA, 20 bp, synthetic construct
  source 1..20: mol_type = other DNA
actccctgcggctgttctca

SEQ ID NO: 283095 - DNA, 20 bp, synthetic construct
  source 1..20: mol_type = other DNA
aactccctgcggctgttctc

SEQ ID NO: 283096 - DNA, 20 bp, synthetic construct
  source 1..20: mol_type = other DNA
gaactccctgcggctgttct

SEQ ID NO: 283097 - DNA, 20 bp, synthetic construct
  source 1..20: mol_type = other DNA
agaactccctgcggctgttc

SEQ ID NO: 283098 - DNA, 20 bp, synthetic construct
  source 1..20: mol_type = other DNA
gagaactccctgcggctgtt

SEQ ID NO: 283099 - DNA, 20 bp, synthetic construct
  source 1..20: mol_type = other DNA
agagaactccctgcggctgt

SEQ ID NO: 283100 - DNA, 20 bp, synthetic construct
  source 1..20: mol_type = other DNA
cagagaactccctgcggctg

SEQ ID NO: 283101 - DNA, 20 bp, synthetic construct
  source 1..20: mol_type = other DNA
ccagagaactccctgcggct

SEQ ID NO: 283102 - DNA, 20 bp, synthetic construct
  source 1..20: mol_type = other DNA
cccagagaactccctgcggc

SEQ ID NO: 283103 - DNA, 20 bp, synthetic construct
  source 1..20: mol_type = other DNA
tcccagagaactccctgcgg

SEQ ID NO: 283104 - DNA, 20 bp, synthetic construct
  source 1..20: mol_type = other DNA
ttcccagagaactccctgcg

SEQ ID NO: 283105 - DNA, 20 bp, synthetic construct
  source 1..20: mol_type = other DNA
attcccagagaactccctgc

SEQ ID NO: 283106 - DNA, 20 bp, synthetic construct
  source 1..20: mol_type = other DNA
cattcccagagaactccctg

SEQ ID NO: 283107 - DNA, 20 bp, synthetic construct
  source 1..20: mol_type = other DNA
acattcccagagaactccct

SEQ ID NO: 283108 - DNA, 20 bp, synthetic construct
  source 1..20: mol_type = other DNA
cacattcccagagaactccc

SEQ ID NO: 283109 - DNA, 20 bp, synthetic construct
  source 1..20: mol_type = other DNA
gcacattcccagagaactcc

SEQ ID NO: 283110 - DNA, 20 bp, synthetic construct
  source 1..20: mol_type = other DNA
ggcacattcccagagaactc

SEQ ID NO: 283111 - DNA, 20 bp, synthetic construct
  source 1..20: mol_type = other DNA
cggcacattcccagagaact

SEQ ID NO: 283112 - DNA, 20 bp, synthetic construct
  source 1..20: mol_type = other DNA
ccggcacattcccagagaac

SEQ ID NO: 283113 - DNA, 20 bp, synthetic construct
  source 1..20: mol_type = other DNA
accggcacattcccagagaa

SEQ ID NO: 283114 - DNA, 20 bp, synthetic construct
  source 1..20: mol_type = other DNA
caccggcacattcccagaga

SEQ ID NO: 283115 - DNA, 20 bp, synthetic construct
  source 1..20: mol_type = other DNA
ccaccggcacattcccagag

SEQ ID NO: 283116 - DNA, 20 bp, synthetic construct
  source 1..20: mol_type = other DNA
cccaccggcacattcccaga

SEQ ID NO: 283117 - DNA, 20 bp, synthetic construct
  source 1..20: mol_type = other DNA
acccaccggcacattcccag

SEQ ID NO: 283118 - DNA, 20 bp, synthetic construct
  source 1..20: mol_type = other DNA
gacccaccggcacattccca

SEQ ID NO: 283119 - DNA, 20 bp, synthetic construct
  source 1..20: mol_type = other DNA
agacccaccggcacattccc

SEQ ID NO: 283120 - DNA, 20 bp, synthetic construct
  source 1..20: mol_type = other DNA
tagacccaccggcacattcc

SEQ ID NO: 283121 - DNA, 20 bp, synthetic construct
  source 1..20: mol_type = other DNA
ctagacccaccggcacattc

SEQ ID NO: 283122 - DNA, 20 bp, synthetic construct
  source 1..20: mol_type = other DNA
gctagacccaccggcacatt

SEQ ID NO: 283123 - DNA, 20 bp, synthetic construct
  source 1..20: mol_type = other DNA
ggctagacccaccggcacat

SEQ ID NO: 283124 - DNA, 20 bp, synthetic construct
  source 1..20: mol_type = other DNA
tggctagacccaccggcaca

SEQ ID NO: 283125 - DNA, 20 bp, synthetic construct
  source 1..20: mol_type = other DNA
ctggctagacccaccggcac

SEQ ID NO: 283126 - DNA, 20 bp, synthetic construct
  source 1..20: mol_type = other DNA
cctggctagacccaccggca

SEQ ID NO: 283127 - DNA, 20 bp, synthetic construct
  source 1..20: mol_type = other DNA
acctggctagacccaccggc

SEQ ID NO: 283128 - DNA, 20 bp, synthetic construct
  source 1..20: mol_type = other DNA
cacctggctagacccaccgg

SEQ ID NO: 283129 - DNA, 20 bp, synthetic construct
  source 1..20: mol_type = other DNA
acacctggctagacccaccg

SEQ ID NO: 283130 - DNA, 20 bp, synthetic construct
  source 1..20: mol_type = other DNA
cacacctggctagacccacc

SEQ ID NO: 283131 - DNA, 20 bp, synthetic construct
  source 1..20: mol_type = other DNA
tcacacctggctagacccac

SEQ ID NO: 283132 - DNA, 20 bp, synthetic construct
  source 1..20: mol_type = other DNA
ctcacacctggctagaccca

SEQ ID NO: 283133 - DNA, 20 bp, synthetic construct
  source 1..20: mol_type = other DNA
actcacacctggctagaccc

SEQ ID NO: 283134 - DNA, 20 bp, synthetic construct
  source 1..20: mol_type = other DNA
cactcacacctggctagacc

SEQ ID NO: 283135 - DNA, 20 bp, synthetic construct
  source 1..20: mol_type = other DNA
ccactcacacctggctagac

SEQ ID NO: 283136 - DNA, 20 bp, synthetic construct
  source 1..20: mol_type = other DNA
tccactcacacctggctaga

SEQ ID NO: 283137 - DNA, 20 bp, synthetic construct
  source 1..20: mol_type = other DNA
ctccactcacacctggctag

SEQ ID NO: 283138 - DNA, 20 bp, synthetic construct
  source 1..20: mol_type = other DNA
tctccactcacacctggcta

SEQ ID NO: 283139 - DNA, 20 bp, synthetic construct
  source 1..20: mol_type = other DNA
atctccactcacacctggct

SEQ ID NO: 283140 - DNA, 20 bp, synthetic construct
  source 1..20: mol_type = other DNA
catctccactcacacctggc

SEQ ID NO: 283141 - DNA, 20 bp, synthetic construct
  source 1..20: mol_type = other DNA
gcatctccactcacacctgg

SEQ ID NO: 283142 - DNA, 20 bp, synthetic construct
  source 1..20: mol_type = other DNA
ggcatctccactcacacctg

SEQ ID NO: 283143 - DNA, 20 bp, synthetic construct
  source 1..20: mol_type = other DNA
cggcatctccactcacacct

SEQ ID NO: 283144 - DNA, 20 bp, synthetic construct
  source 1..20: mol_type = other DNA
ccggcatctccactcacacc

SEQ ID NO: 283145 - DNA, 20 bp, synthetic construct
  source 1..20: mol_type = other DNA
cccggcatctccactcacac

SEQ ID NO: 283146 - DNA, 20 bp, synthetic construct
  source 1..20: mol_type = other DNA
ccccggcatctccactcaca

SEQ ID NO: 283147 - DNA, 20 bp, synthetic construct
  source 1..20: mol_type = other DNA
tccccggcatctccactcac

SEQ ID NO: 283148 - DNA, 20 bp, synthetic construct
  source 1..20: mol_type = other DNA
ttccccggcatctccactca

SEQ ID NO: 283149 - DNA, 20 bp, synthetic construct
  source 1..20: mol_type = other DNA
gttccccggcatctccactc

SEQ ID NO: 283150 - DNA, 20 bp, synthetic construct
  source 1..20: mol_type = other DNA
agttccccggcatctccact

SEQ ID NO: 283151 - DNA, 20 bp, synthetic construct
  source 1..20: mol_type = other DNA
aagttccccggcatctccac

SEQ ID NO: 283152 - DNA, 20 bp, synthetic construct
  source 1..20: mol_type = other DNA
gaagttccccggcatctcca

SEQ ID NO: 283153 - DNA, 20 bp, synthetic construct
  source 1..20: mol_type = other DNA
ggaagttccccggcatctcc

SEQ ID NO: 283154 - DNA, 20 bp, synthetic construct
  source 1..20: mol_type = other DNA
aggaagttccccggcatctc

SEQ ID NO: 283155 - DNA, 20 bp, synthetic construct
  source 1..20: mol_type = other DNA
taggaagttccccggcatct

SEQ ID NO: 283156 - DNA, 20 bp, synthetic construct
  source 1..20: mol_type = other DNA
ataggaagttccccggcatc

SEQ ID NO: 283157 - DNA, 20 bp, synthetic construct
  source 1..20: mol_type = other DNA
aataggaagttccccggcat

SEQ ID NO: 283158 - DNA, 20 bp, synthetic construct
  source 1..20: mol_type = other DNA
taataggaagttccccggca

SEQ ID NO: 283159 - DNA, 20 bp, synthetic construct
  source 1..20: mol_type = other DNA
gtaataggaagttccccggc

SEQ ID NO: 283160 - DNA, 20 bp, synthetic construct
  source 1..20: mol_type = other DNA
agtaataggaagttccccgg

SEQ ID NO: 283161 - DNA, 20 bp, synthetic construct
  source 1..20: mol_type = other DNA
gagtaataggaagttccccg

SEQ ID NO: 283162 - DNA, 20 bp, synthetic construct
  source 1..20: mol_type = other DNA
tgagtaataggaagttcccc

SEQ ID NO: 283163 - DNA, 20 bp, synthetic construct
  source 1..20: mol_type = other DNA
gtgagtaataggaagttccc

SEQ ID NO: 283164 - DNA, 20 bp, synthetic construct
  source 1..20: mol_type = other DNA
agtgagtaataggaagttcc

SEQ ID NO: 283165 - DNA, 20 bp, synthetic construct
  source 1..20: mol_type = other DNA
gagtgagtaataggaagttc

SEQ ID NO: 283166 - DNA, 20 bp, synthetic construct
  source 1..20: mol_type = other DNA
cgagtgagtaataggaagtt

SEQ ID NO: 283167 - DNA, 20 bp, synthetic construct
  source 1..20: mol_type = other DNA
acgagtgagtaataggaagt

SEQ ID NO: 283168 - DNA, 20 bp, synthetic construct
  source 1..20: mol_type = other DNA
gacgagtgagtaataggaag

SEQ ID NO: 283169 - DNA, 20 bp, synthetic construct
  source 1..20: mol_type = other DNA
tgacgagtgagtaataggaa

SEQ ID NO: 283170 - DNA, 20 bp, synthetic construct
  source 1..20: mol_type = other DNA
ctgacgagtgagtaatagga

SEQ ID NO: 283171 - DNA, 20 bp, synthetic construct
  source 1..20: mol_type = other DNA
actgacgagtgagtaatagg

SEQ ID NO: 283172 - DNA, 20 bp, synthetic construct
  source 1..20: mol_type = other DNA
cactgacgagtgagtaatag

SEQ ID NO: 283173 - DNA, 20 bp, synthetic construct
  source 1..20: mol_type = other DNA
acactgacgagtgagtaata

SEQ ID NO: 283174 - DNA, 20 bp, synthetic construct
  source 1..20: mol_type = other DNA
cacactgacgagtgagtaat

SEQ ID NO: 283175 - DNA, 20 bp, synthetic construct
  source 1..20: mol_type = other DNA
ccacactgacgagtgagtaa

SEQ ID NO: 283176 - DNA, 20 bp, synthetic construct
  source 1..20: mol_type = other DNA
gccacactgacgagtgagta

SEQ ID NO: 283177 - DNA, 20 bp, synthetic construct
  source 1..20: mol_type = other DNA
ggccacactgacgagtgagt

SEQ ID NO: 283178 - DNA, 20 bp, synthetic construct
  source 1..20: mol_type = other DNA
cggccacactgacgagtgag

SEQ ID NO: 283179 - DNA, 20 bp, synthetic construct
  source 1..20: mol_type = other DNA
tcggccacactgacgagtga

SEQ ID NO: 283180 - DNA, 20 bp, synthetic construct
  source 1..20: mol_type = other DNA
ttcggccacactgacgagtg

SEQ ID NO: 283181 - DNA, 20 bp, synthetic construct
  source 1..20: mol_type = other DNA
gttcggccacactgacgagt

SEQ ID NO: 283182 - DNA, 20 bp, synthetic construct
  source 1..20: mol_type = other DNA
tgttcggccacactgacgag

SEQ ID NO: 283183 - DNA, 20 bp, synthetic construct
  source 1..20: mol_type = other DNA
gtgttcggccacactgacga

SEQ ID NO: 283184 - DNA, 20 bp, synthetic construct
  source 1..20: mol_type = other DNA
tgtgttcggccacactgacg

SEQ ID NO: 283185 - DNA, 20 bp, synthetic construct
  source 1..20: mol_type = other DNA
atgtgttcggccacactgac

SEQ ID NO: 283186 - DNA, 20 bp, synthetic construct
  source 1..20: mol_type = other DNA
aatgtgttcggccacactga

SEQ ID NO: 283187 - DNA, 20 bp, synthetic construct
  source 1..20: mol_type = other DNA
aaatgtgttcggccacactg

SEQ ID NO: 283188 - DNA, 20 bp, synthetic construct
  source 1..20: mol_type = other DNA
aaaatgtgttcggccacact

SEQ ID NO: 283189 - DNA, 20 bp, synthetic construct
  source 1..20: mol_type = other DNA
aaaaatgtgttcggccacac

SEQ ID NO: 283190 - DNA, 20 bp, synthetic construct
  source 1..20: mol_type = other DNA
gaaaaatgtgttcggccaca

SEQ ID NO: 283191 - DNA, 20 bp, synthetic construct
  source 1..20: mol_type = other DNA
tgaaaaatgtgttcggccac

SEQ ID NO: 283192 - DNA, 20 bp, synthetic construct
  source 1..20: mol_type = other DNA
gtgaaaaatgtgttcggcca

SEQ ID NO: 283193 - DNA, 20 bp, synthetic construct
  source 1..20: mol_type = other DNA
agtgaaaaatgtgttcggcc

SEQ ID NO: 283194 - DNA, 20 bp, synthetic construct
  source 1..20: mol_type = other DNA
aagtgaaaaatgtgttcggc

SEQ ID NO: 283195 - DNA, 20 bp, synthetic construct
  source 1..20: mol_type = other DNA
caagtgaaaaatgtgttcgg

SEQ ID NO: 283196 - DNA, 20 bp, synthetic construct
  source 1..20: mol_type = other DNA
tcaagtgaaaaatgtgttcg

SEQ ID NO: 283197 - DNA, 20 bp, synthetic construct
  source 1..20: mol_type = other DNA
gtcaagtgaaaaatgtgttc

SEQ ID NO: 283198 - DNA, 20 bp, synthetic construct
  source 1..20: mol_type = other DNA
ggtcaagtgaaaaatgtgtt

SEQ ID NO: 283199 - DNA, 20 bp, synthetic construct
  source 1..20: mol_type = other DNA
aggtcaagtgaaaaatgtgt

SEQ ID NO: 283200 - DNA, 20 bp, synthetic construct
  source 1..20: mol_type = other DNA
gaggtcaagtgaaaaatgtg

SEQ ID NO: 283201 - DNA, 20 bp, synthetic construct
  source 1..20: mol_type = other DNA
tgaggtcaagtgaaaaatgt

SEQ ID NO: 283202 - DNA, 20 bp, synthetic construct
  source 1..20: mol_type = other DNA
ctgaggtcaagtgaaaaatg

SEQ ID NO: 283203 - DNA, 20 bp, synthetic construct
  source 1..20: mol_type = other DNA
cctgaggtcaagtgaaaaat

SEQ ID NO: 283204 - DNA, 20 bp, synthetic construct
  source 1..20: mol_type = other DNA
gcctgaggtcaagtgaaaaa

SEQ ID NO: 283205 - DNA, 20 bp, synthetic construct
  source 1..20: mol_type = other DNA
agcctgaggtcaagtgaaaa

SEQ ID NO: 283206 - DNA, 20 bp, synthetic construct
  source 1..20: mol_type = other DNA
cagcctgaggtcaagtgaaa

SEQ ID NO: 283207 - DNA, 20 bp, synthetic construct
  source 1..20: mol_type = other DNA
ccagcctgaggtcaagtgaa

SEQ ID NO: 283208 - DNA, 20 bp, synthetic construct
  source 1..20: mol_type = other DNA
accagcctgaggtcaagtga

SEQ ID NO: 283209 - DNA, 20 bp, synthetic construct
  source 1..20: mol_type = other DNA
caccagcctgaggtcaagtg

SEQ ID NO: 283210 - DNA, 20 bp, synthetic construct
  source 1..20: mol_type = other DNA
tcaccagcctgaggtcaagt

SEQ ID NO: 283211 - DNA, 20 bp, synthetic construct
  source 1..20: mol_type = other DNA
ttcaccagcctgaggtcaag

SEQ ID NO: 283212 - DNA, 20 bp, synthetic construct
  source 1..20: mol_type = other DNA
gttcaccagcctgaggtcaa

SEQ ID NO: 283213 - DNA, 20 bp, synthetic construct
  source 1..20: mol_type = other DNA
cgttcaccagcctgaggtca

SEQ ID NO: 283214 - DNA, 20 bp, synthetic construct
  source 1..20: mol_type = other DNA
gcgttcaccagcctgaggtc

SEQ ID NO: 283215 - DNA, 20 bp, synthetic construct
  source 1..20: mol_type = other DNA
agcgttcaccagcctgaggt

SEQ ID NO: 283216 - DNA, 20 bp, synthetic construct
  source 1..20: mol_type = other DNA
gagcgttcaccagcctgagg

SEQ ID NO: 283217 - DNA, 20 bp, synthetic construct
  source 1..20: mol_type = other DNA
ggagcgttcaccagcctgag

SEQ ID NO: 283218 - DNA, 20 bp, synthetic construct
  source 1..20: mol_type = other DNA
gggagcgttcaccagcctga

SEQ ID NO: 283219 - DNA, 20 bp, synthetic construct
  source 1..20: mol_type = other DNA
ggggagcgttcaccagcctg

SEQ ID NO: 283220 - DNA, 20 bp, synthetic construct
  source 1..20: mol_type = other DNA
aggggagcgttcaccagcct

SEQ ID NO: 283221 - DNA, 20 bp, synthetic construct
  source 1..20: mol_type = other DNA
gaggggagcgttcaccagcc

SEQ ID NO: 283222 - DNA, 20 bp, synthetic construct
  source 1..20: mol_type = other DNA
agaggggagcgttcaccagc

SEQ ID NO: 283223 - DNA, 20 bp, synthetic construct
  source 1..20: mol_type = other DNA
cagaggggagcgttcaccag

SEQ ID NO: 283224 - DNA, 20 bp, synthetic construct
  source 1..20: mol_type = other DNA
ccagaggggagcgttcacca

SEQ ID NO: 283225 - DNA, 20 bp, synthetic construct
  source 1..20: mol_type = other DNA
cccagaggggagcgttcacc

SEQ ID NO: 283226 - DNA, 20 bp, synthetic construct
  source 1..20: mol_type = other DNA
ccccagaggggagcgttcac

SEQ ID NO: 283227 - DNA, 20 bp, synthetic construct
  source 1..20: mol_type = other DNA
accccagaggggagcgttca

SEQ ID NO: 283228 - DNA, 20 bp, synthetic construct
  source 1..20: mol_type = other DNA
aaccccagaggggagcgttc

SEQ ID NO: 283229 - DNA, 20 bp, synthetic construct
  source 1..20: mol_type = other DNA
gaaccccagaggggagcgtt

SEQ ID NO: 283230 - DNA, 20 bp, synthetic construct
  source 1..20: mol_type = other DNA
tgaaccccagaggggagcgt

SEQ ID NO: 283231 - DNA, 20 bp, synthetic construct
  source 1..20: mol_type = other DNA
ctgaaccccagaggggagcg

SEQ ID NO: 283232 - DNA, 20 bp, synthetic construct
  source 1..20: mol_type = other DNA
cctgaaccccagaggggagc

SEQ ID NO: 283233 - DNA, 20 bp, synthetic construct
  source 1..20: mol_type = other DNA
gcctgaaccccagaggggag

SEQ ID NO: 283234 - DNA, 20 bp, synthetic construct
  source 1..20: mol_type = other DNA
ggcctgaaccccagagggga

SEQ ID NO: 283235 - DNA, 20 bp, synthetic construct
  source 1..20: mol_type = other DNA
aggcctgaaccccagagggg

SEQ ID NO: 283236 - DNA, 20 bp, synthetic construct
  source 1..20: mol_type = other DNA
gaggcctgaaccccagaggg

SEQ ID NO: 283237 - DNA, 20 bp, synthetic construct
  source 1..20: mol_type = other DNA
tgaggcctgaaccccagagg

SEQ ID NO: 283238 - DNA, 20 bp, synthetic construct
  source 1..20: mol_type = other DNA
gtgaggcctgaaccccagag

SEQ ID NO: 283239 - DNA, 20 bp, synthetic construct
  source 1..20: mol_type = other DNA
cgtgaggcctgaaccccaga

SEQ ID NO: 283240 - DNA, 20 bp, synthetic construct
  source 1..20: mol_type = other DNA
tcgtgaggcctgaaccccag

SEQ ID NO: 283241 - DNA, 20 bp, synthetic construct
  source 1..20: mol_type = other DNA
atcgtgaggcctgaacccca

SEQ ID NO: 283242 - DNA, 20 bp, synthetic construct
  source 1..20: mol_type = other DNA
catcgtgaggcctgaacccc

SEQ ID NO: 283243 - DNA, 20 bp, synthetic construct
  source 1..20: mol_type = other DNA
gcatcgtgaggcctgaaccc

SEQ ID NO: 283244 - DNA, 20 bp, synthetic construct
  source 1..20: mol_type = other DNA
ggcatcgtgaggcctgaacc

SEQ ID NO: 283245 - DNA, 20 bp, synthetic construct
  source 1..20: mol_type = other DNA
tggcatcgtgaggcctgaac

SEQ ID NO: 283246 - DNA, 20 bp, synthetic construct
  source 1..20: mol_type = other DNA
atggcatcgtgaggcctgaa

SEQ ID NO: 283247 - DNA, 20 bp, synthetic construct
  source 1..20: mol_type = other DNA
gatggcatcgtgaggcctga

SEQ ID NO: 283248 - DNA, 20 bp, synthetic construct
  source 1..20: mol_type = other DNA
ggatggcatcgtgaggcctg

SEQ ID NO: 283249 - DNA, 20 bp, synthetic construct
  source 1..20: mol_type = other DNA
aggatggcatcgtgaggcct

SEQ ID NO: 283250 - DNA, 20 bp, synthetic construct
  source 1..20: mol_type = other DNA
aaggatggcatcgtgaggcc

SEQ ID NO: 283251 - DNA, 20 bp, synthetic construct
  source 1..20: mol_type = other DNA
aaaggatggcatcgtgaggc

SEQ ID NO: 283252 - DNA, 20 bp, synthetic construct
  source 1..20: mol_type = other DNA
aaaaggatggcatcgtgagg

SEQ ID NO: 283253 - DNA, 20 bp, synthetic construct
  source 1..20: mol_type = other DNA
caaaaggatggcatcgtgag

SEQ ID NO: 283254 - DNA, 20 bp, synthetic construct
  source 1..20: mol_type = other DNA
acaaaaggatggcatcgtga

SEQ ID NO: 283255 - DNA, 20 bp, synthetic construct
  source 1..20: mol_type = other DNA
cacaaaaggatggcatcgtg

SEQ ID NO: 283256 - DNA, 20 bp, synthetic construct
  source 1..20: mol_type = other DNA
tcacaaaaggatggcatcgt

SEQ ID NO: 283257 - DNA, 20 bp, synthetic construct
  source 1..20: mol_type = other DNA
ttcacaaaaggatggcatcg

SEQ ID NO: 283258 - DNA, 20 bp, synthetic construct
  source 1..20: mol_type = other DNA
cttcacaaaaggatggcatc

SEQ ID NO: 283259 - DNA, 20 bp, synthetic construct
  source 1..20: mol_type = other DNA
acttcacaaaaggatggcat

SEQ ID NO: 283260 - DNA, 20 bp, synthetic construct
  source 1..20: mol_type = other DNA
cacttcacaaaaggatggca

SEQ ID NO: 283261 - DNA, 20 bp, synthetic construct
  source 1..20: mol_type = other DNA
tcacttcacaaaaggatggc

SEQ ID NO: 283262 - DNA, 20 bp, synthetic construct
  source 1..20: mol_type = other DNA
ctcacttcacaaaaggatgg

SEQ ID NO: 283263 - DNA, 20 bp, synthetic construct
  source 1..20: mol_type = other DNA
cctcacttcacaaaaggatg

SEQ ID NO: 283264 - DNA, 20 bp, synthetic construct
  source 1..20: mol_type = other DNA
tcctcacttcacaaaaggat

SEQ ID NO: 283265 - DNA, 20 bp, synthetic construct
  source 1..20: mol_type = other DNA
gtcctcacttcacaaaagga

SEQ ID NO: 283266 - DNA, 20 bp, synthetic construct
  source 1..20: mol_type = other DNA
ggtcctcacttcacaaaagg

SEQ ID NO: 283267 - DNA, 20 bp, synthetic construct
  source 1..20: mol_type = other DNA
aggtcctcacttcacaaaag

SEQ ID NO: 283268 - DNA, 20 bp, synthetic construct
  source 1..20: mol_type = other DNA
caggtcctcacttcacaaaa

SEQ ID NO: 283269 - DNA, 20 bp, synthetic construct
  source 1..20: mol_type = other DNA
gcaggtcctcacttcacaaa

SEQ ID NO: 283270 - DNA, 20 bp, synthetic construct
  source 1..20: mol_type = other DNA
tgcaggtcctcacttcacaa

SEQ ID NO: 283271 - DNA, 20 bp, synthetic construct
  source 1..20: mol_type = other DNA
ttgcaggtcctcacttcaca

SEQ ID NO: 283272 - DNA, 20 bp, synthetic construct
  source 1..20: mol_type = other DNA
attgcaggtcctcacttcac

SEQ ID NO: 283273 - DNA, 20 bp, synthetic construct
  source 1..20: mol_type = other DNA
gattgcaggtcctcacttca

SEQ ID NO: 283274 - DNA, 20 bp, synthetic construct
  source 1..20: mol_type = other DNA
ggattgcaggtcctcacttc

SEQ ID NO: 283275 - DNA, 20 bp, synthetic construct
  source 1..20: mol_type = other DNA
gggattgcaggtcctcactt

SEQ ID NO: 283276 - DNA, 20 bp, synthetic construct
  source 1..20: mol_type = other DNA
tgggattgcaggtcctcact

SEQ ID NO: 283277 - DNA, 20 bp, synthetic construct
  source 1..20: mol_type = other DNA
ctgggattgcaggtcctcac

SEQ ID NO: 283278 - DNA, 20 bp, synthetic construct
  source 1..20: mol_type = other DNA
gctgggattgcaggtcctca

SEQ ID NO: 283279 - DNA, 20 bp, synthetic construct
  source 1..20: mol_type = other DNA
agctgggattgcaggtcctc

SEQ ID NO: 283280 - DNA, 20 bp, synthetic construct
  source 1..20: mol_type = other DNA
aagctgggattgcaggtcct

SEQ ID NO: 283281 - DNA, 20 bp, synthetic construct
  source 1..20: mol_type = other DNA
gaagctgggattgcaggtcc

SEQ ID NO: 283282 - DNA, 20 bp, synthetic construct
  source 1..20: mol_type = other DNA
cgaagctgggattgcaggtc

SEQ ID NO: 283283 - DNA, 20 bp, synthetic construct
  source 1..20: mol_type = other DNA
acgaagctgggattgcaggt

SEQ ID NO: 283284 - DNA, 20 bp, synthetic construct
  source 1..20: mol_type = other DNA
tacgaagctgggattgcagg

SEQ ID NO: 283285 - DNA, 20 bp, synthetic construct
  source 1..20: mol_type = other DNA
ttacgaagctgggattgcag

SEQ ID NO: 283286 - DNA, 20 bp, synthetic construct
  source 1..20: mol_type = other DNA
tttacgaagctgggattgca

SEQ ID NO: 283287 - DNA, 20 bp, synthetic construct
  source 1..20: mol_type = other DNA
ctttacgaagctgggattgc

SEQ ID NO: 283288 - DNA, 20 bp, synthetic construct
  source 1..20: mol_type = other DNA
gctttacgaagctgggattg

SEQ ID NO: 283289 - DNA, 20 bp, synthetic construct
  source 1..20: mol_type = other DNA
ggctttacgaagctgggatt

SEQ ID NO: 283290 - DNA, 20 bp, synthetic construct
  source 1..20: mol_type = other DNA
gggctttacgaagctgggat

SEQ ID NO: 283291 - DNA, 20 bp, synthetic construct
  source 1..20: mol_type = other DNA
cgggctttacgaagctggga

SEQ ID NO: 283292 - DNA, 20 bp, synthetic construct
  source 1..20: mol_type = other DNA
gcgggctttacgaagctggg

SEQ ID NO: 283293 - DNA, 20 bp, synthetic construct
  source 1..20: mol_type = other DNA
agcgggctttacgaagctgg

SEQ ID NO: 283294 - DNA, 20 bp, synthetic construct
  source 1..20: mol_type = other DNA
cagcgggctttacgaagctg

SEQ ID NO: 283295 - DNA, 20 bp, synthetic construct
  source 1..20: mol_type = other DNA
ccagcgggctttacgaagct

SEQ ID NO: 283296 - DNA, 20 bp, synthetic construct
  source 1..20: mol_type = other DNA
tccagcgggctttacgaagc

SEQ ID NO: 283297 - DNA, 20 bp, synthetic construct
  source 1..20: mol_type = other DNA
ttccagcgggctttacgaag

SEQ ID NO: 283298 - DNA, 20 bp, synthetic construct
  source 1..20: mol_type = other DNA
tttccagcgggctttacgaa

SEQ ID NO: 283299 - DNA, 20 bp, synthetic construct
  source 1..20: mol_type = other DNA
atttccagcgggctttacga

SEQ ID NO: 283300 - DNA, 20 bp, synthetic construct
  source 1..20: mol_type = other DNA
gatttccagcgggctttacg

SEQ ID NO: 283301 - DNA, 20 bp, synthetic construct
  source 1..20: mol_type = other DNA
tgatttccagcgggctttac

SEQ ID NO: 283302 - DNA, 20 bp, synthetic construct
  source 1..20: mol_type = other DNA
gtgatttccagcgggcttta

SEQ ID NO: 283303 - DNA, 20 bp, synthetic construct
  source 1..20: mol_type = other DNA
agtgatttccagcgggcttt

SEQ ID NO: 283304 - DNA, 20 bp, synthetic construct
  source 1..20: mol_type = other DNA
gagtgatttccagcgggctt

SEQ ID NO: 283305 - DNA, 20 bp, synthetic construct
  source 1..20: mol_type = other DNA
tgagtgatttccagcgggct

SEQ ID NO: 283306 - DNA, 20 bp, synthetic construct
  source 1..20: mol_type = other DNA
gtgagtgatttccagcgggc

SEQ ID NO: 283307 - DNA, 20 bp, synthetic construct
  source 1..20: mol_type = other DNA
tgtgagtgatttccagcggg

SEQ ID NO: 283308 - DNA, 20 bp, synthetic construct
  source 1..20: mol_type = other DNA
gtgtgagtgatttccagcgg

SEQ ID NO: 283309 - DNA, 20 bp, synthetic construct
  source 1..20: mol_type = other DNA
agtgtgagtgatttccagcg

SEQ ID NO: 283310 - DNA, 20 bp, synthetic construct
  source 1..20: mol_type = other DNA
aagtgtgagtgatttccagc

SEQ ID NO: 283311 - DNA, 20 bp, synthetic construct
  source 1..20: mol_type = other DNA
gaagtgtgagtgatttccag

SEQ ID NO: 283312 - DNA, 20 bp, synthetic construct
  source 1..20: mol_type = other DNA
agaagtgtgagtgatttcca

SEQ ID NO: 283313 - DNA, 20 bp, synthetic construct
  source 1..20: mol_type = other DNA
cagaagtgtgagtgatttcc

SEQ ID NO: 283314 - DNA, 20 bp, synthetic construct
  source 1..20: mol_type = other DNA
ccagaagtgtgagtgatttc

SEQ ID NO: 283315 - DNA, 20 bp, synthetic construct
  source 1..20: mol_type = other DNA
cccagaagtgtgagtgattt

SEQ ID NO: 283316 - DNA, 20 bp, synthetic construct
  source 1..20: mol_type = other DNA
tcccagaagtgtgagtgatt

SEQ ID NO: 283317 - DNA, 20 bp, synthetic construct
  source 1..20: mol_type = other DNA
atcccagaagtgtgagtgat

SEQ ID NO: 283318 - DNA, 20 bp, synthetic construct
  source 1..20: mol_type = other DNA
catcccagaagtgtgagtga

SEQ ID NO: 283319 - DNA, 20 bp, synthetic construct
  source 1..20: mol_type = other DNA
gcatcccagaagtgtgagtg

SEQ ID NO: 283320 - DNA, 20 bp, synthetic construct
  source 1..20: mol_type = other DNA
ggcatcccagaagtgtgagt

SEQ ID NO: 283321 - DNA, 20 bp, synthetic construct
  source 1..20: mol_type = other DNA
aggcatcccagaagtgtgag

SEQ ID NO: 283322 - DNA, 20 bp, synthetic construct
  source 1..20: mol_type = other DNA
aaggcatcccagaagtgtga

SEQ ID NO: 283323 - DNA, 20 bp, synthetic construct
  source 1..20: mol_type = other DNA
gaaggcatcccagaagtgtg

SEQ ID NO: 283324 - DNA, 20 bp, synthetic construct
  source 1..20: mol_type = other DNA
tgaaggcatcccagaagtgt

SEQ ID NO: 283325 - DNA, 20 bp, synthetic construct
  source 1..20: mol_type = other DNA
ctgaaggcatcccagaagtg

SEQ ID NO: 283326 - DNA, 20 bp, synthetic construct
  source 1..20: mol_type = other DNA
tctgaaggcatcccagaagt

SEQ ID NO: 283327 - DNA, 20 bp, synthetic construct
  source 1..20: mol_type = other DNA
ctctgaaggcatcccagaag

SEQ ID NO: 283328 - DNA, 20 bp, synthetic construct
  source 1..20: mol_type = other DNA
gctctgaaggcatcccagaa

SEQ ID NO: 283329 - DNA, 20 bp, synthetic construct
  source 1..20: mol_type = other DNA
tgctctgaaggcatcccaga

SEQ ID NO: 283330 - DNA, 20 bp, synthetic construct
  source 1..20: mol_type = other DNA
ctgctctgaaggcatcccag

SEQ ID NO: 283331 - DNA, 20 bp, synthetic construct
  source 1..20: mol_type = other DNA
gctgctctgaaggcatccca

SEQ ID NO: 283332 - DNA, 20 bp, synthetic construct
  source 1..20: mol_type = other DNA
ggctgctctgaaggcatccc

SEQ ID NO: 283333 - DNA, 20 bp, synthetic construct
  source 1..20: mol_type = other DNA
gggctgctctgaaggcatcc

SEQ ID NO: 283334 - DNA, 20 bp, synthetic construct
  source 1..20: mol_type = other DNA
agggctgctctgaaggcatc

SEQ ID NO: 283335 - DNA, 20 bp, synthetic construct
  source 1..20: mol_type = other DNA
gagggctgctctgaaggcat

SEQ ID NO: 283336 - DNA, 20 bp, synthetic construct
  source 1..20: mol_type = other DNA
agagggctgctctgaaggca

SEQ ID NO: 283337 - DNA, 20 bp, synthetic construct
  source 1..20: mol_type = other DNA
tagagggctgctctgaaggc

SEQ ID NO: 283338 - DNA, 20 bp, synthetic construct
  source 1..20: mol_type = other DNA
atagagggctgctctgaagg

SEQ ID NO: 283339 - DNA, 20 bp, synthetic construct
  source 1..20: mol_type = other DNA
gatagagggctgctctgaag

SEQ ID NO: 283340 - DNA, 20 bp, synthetic construct
  source 1..20: mol_type = other DNA
ggatagagggctgctctgaa

SEQ ID NO: 283341 - DNA, 20 bp, synthetic construct
  source 1..20: mol_type = other DNA
gggatagagggctgctctga

SEQ ID NO: 283342 - DNA, 20 bp, synthetic construct
  source 1..20: mol_type = other DNA
agggatagagggctgctctg

SEQ ID NO: 283343 - DNA, 20 bp, synthetic construct
  source 1..20: mol_type = other DNA
aagggatagagggctgctct

SEQ ID NO: 283344 - DNA, 20 bp, synthetic construct
  source 1..20: mol_type = other DNA
gaagggatagagggctgctc

SEQ ID NO: 283345 - DNA, 20 bp, synthetic construct
  source 1..20: mol_type = other DNA
tgaagggatagagggctgct

SEQ ID NO: 283346 - DNA, 20 bp, synthetic construct
  source 1..20: mol_type = other DNA
ctgaagggatagagggctgc

SEQ ID NO: 283347 - DNA, 20 bp, synthetic construct
  source 1..20: mol_type = other DNA
gctgaagggatagagggctg

SEQ ID NO: 283348 - DNA, 20 bp, synthetic construct
  source 1..20: mol_type = other DNA
agctgaagggatagagggct

SEQ ID NO: 283349 - DNA, 20 bp, synthetic construct
  source 1..20: mol_type = other DNA
gagctgaagggatagagggc

SEQ ID NO: 283350 - DNA, 20 bp, synthetic construct
  source 1..20: mol_type = other DNA
ggagctgaagggatagaggg

SEQ ID NO: 283351 - DNA, 20 bp, synthetic construct
  source 1..20: mol_type = other DNA
gggagctgaagggatagagg

SEQ ID NO: 283352 - DNA, 20 bp, synthetic construct
  source 1..20: mol_type = other DNA
ggggagctgaagggatagag

SEQ ID NO: 283353 - DNA, 20 bp, synthetic construct
  source 1..20: mol_type = other DNA
aggggagctgaagggataga

SEQ ID NO: 283354 - DNA, 20 bp, synthetic construct
  source 1..20: mol_type = other DNA
caggggagctgaagggatag

SEQ ID NO: 283355 - DNA, 20 bp, synthetic construct
  source 1..20: mol_type = other DNA
ccaggggagctgaagggata

SEQ ID NO: 283356 - DNA, 20 bp, synthetic construct
  source 1..20: mol_type = other DNA
cccaggggagctgaagggat

SEQ ID NO: 283357 - DNA, 20 bp, synthetic construct
  source 1..20: mol_type = other DNA
tcccaggggagctgaaggga

SEQ ID NO: 283358 - DNA, 20 bp, synthetic construct
  source 1..20: mol_type = other DNA
atcccaggggagctgaaggg

SEQ ID NO: 283359 - DNA, 20 bp, synthetic construct
  source 1..20: mol_type = other DNA
catcccaggggagctgaagg

SEQ ID NO: 283360 - DNA, 20 bp, synthetic construct
  source 1..20: mol_type = other DNA
acatcccaggggagctgaag

SEQ ID NO: 283361 - DNA, 20 bp, synthetic construct
  source 1..20: mol_type = other DNA
cacatcccaggggagctgaa

SEQ ID NO: 283362 - DNA, 20 bp, synthetic construct
  source 1..20: mol_type = other DNA
tcacatcccaggggagctga

SEQ ID NO: 283363 - DNA, 20 bp, synthetic construct
  source 1..20: mol_type = other DNA
gtcacatcccaggggagctg

SEQ ID NO: 283364 - DNA, 20 bp, synthetic construct
  source 1..20: mol_type = other DNA
agtcacatcccaggggagct

SEQ ID NO: 283365 - DNA, 20 bp, synthetic construct
  source 1..20: mol_type = other DNA
gagtcacatcccaggggagc

SEQ ID NO: 283366 - DNA, 20 bp, synthetic construct
  source 1..20: mol_type = other DNA
tgagtcacatcccaggggag

SEQ ID NO: 283367 - DNA, 20 bp, synthetic construct
  source 1..20: mol_type = other DNA
ttgagtcacatcccagggga

SEQ ID NO: 283368 - DNA, 20 bp, synthetic construct
  source 1..20: mol_type = other DNA
gttgagtcacatcccagggg

SEQ ID NO: 283369 - DNA, 20 bp, synthetic construct
  source 1..20: mol_type = other DNA
ggttgagtcacatcccaggg

SEQ ID NO: 283370 - DNA, 20 bp, synthetic construct
  source 1..20: mol_type = other DNA
aggttgagtcacatcccagg

SEQ ID NO: 283371 - DNA, 20 bp, synthetic construct
  source 1..20: mol_type = other DNA
gaggttgagtcacatcccag

SEQ ID NO: 283372 - DNA, 20 bp, synthetic construct
  source 1..20: mol_type = other DNA
ggaggttgagtcacatccca

SEQ ID NO: 283373 - DNA, 20 bp, synthetic construct
  source 1..20: mol_type = other DNA
gggaggttgagtcacatccc

SEQ ID NO: 283374 - DNA, 20 bp, synthetic construct
  source 1..20: mol_type = other DNA
cgggaggttgagtcacatcc

SEQ ID NO: 283375 - DNA, 20 bp, synthetic construct
  source 1..20: mol_type = other DNA
acgggaggttgagtcacatc

SEQ ID NO: 283376 - DNA, 20 bp, synthetic construct
  source 1..20: mol_type = other DNA
gacgggaggttgagtcacat

SEQ ID NO: 283377 - DNA, 20 bp, synthetic construct
  source 1..20: mol_type = other DNA
tgacgggaggttgagtcaca

SEQ ID NO: 283378 - DNA, 20 bp, synthetic construct
  source 1..20: mol_type = other DNA
gtgacgggaggttgagtcac

SEQ ID NO: 283379 - DNA, 20 bp, synthetic construct
  source 1..20: mol_type = other DNA
agtgacgggaggttgagtca

SEQ ID NO: 283380 - DNA, 20 bp, synthetic construct
  source 1..20: mol_type = other DNA
gagtgacgggaggttgagtc

SEQ ID NO: 283381 - DNA, 20 bp, synthetic construct
  source 1..20: mol_type = other DNA
ggagtgacgggaggttgagt

SEQ ID NO: 283382 - DNA, 20 bp, synthetic construct
  source 1..20: mol_type = other DNA
gggagtgacgggaggttgag

SEQ ID NO: 283383 - DNA, 20 bp, synthetic construct
  source 1..20: mol_type = other DNA
ggggagtgacgggaggttga

SEQ ID NO: 283384 - DNA, 20 bp, synthetic construct
  source 1..20: mol_type = other DNA
tggggagtgacgggaggttg

SEQ ID NO: 283385 - DNA, 20 bp, synthetic construct
  source 1..20: mol_type = other DNA
ctggggagtgacgggaggtt

SEQ ID NO: 283386 - DNA, 20 bp, synthetic construct
  source 1..20: mol_type = other DNA
tctggggagtgacgggaggt

SEQ ID NO: 283387 - DNA, 20 bp, synthetic construct
  source 1..20: mol_type = other DNA
gtctggggagtgacgggagg

SEQ ID NO: 283388 - DNA, 20 bp, synthetic construct
  source 1..20: mol_type = other DNA
agtctggggagtgacgggag

SEQ ID NO: 283389 - DNA, 20 bp, synthetic construct
  source 1..20: mol_type = other DNA
cagtctggggagtgacggga

SEQ ID NO: 283390 - DNA, 20 bp, synthetic construct
  source 1..20: mol_type = other DNA
gcagtctggggagtgacggg

SEQ ID NO: 283391 - DNA, 20 bp, synthetic construct
  source 1..20: mol_type = other DNA
ggcagtctggggagtgacgg

SEQ ID NO: 283392 - DNA, 20 bp, synthetic construct
  source 1..20: mol_type = other DNA
aggcagtctggggagtgacg

SEQ ID NO: 283393 - DNA, 20 bp, synthetic construct
  source 1..20: mol_type = other DNA
gaggcagtctggggagtgac

SEQ ID NO: 283394 - DNA, 20 bp, synthetic construct
  source 1..20: mol_type = other DNA
agaggcagtctggggagtga

SEQ ID NO: 283395 - DNA, 20 bp, synthetic construct
  source 1..20: mol_type = other DNA
cagaggcagtctggggagtg

SEQ ID NO: 283396 - DNA, 20 bp, synthetic construct
  source 1..20: mol_type = other DNA
gcagaggcagtctggggagt

SEQ ID NO: 283397 - DNA, 20 bp, synthetic construct
  source 1..20: mol_type = other DNA
ggcagaggcagtctggggag

SEQ ID NO: 283398 - DNA, 20 bp, synthetic construct
  source 1..20: mol_type = other DNA
tggcagaggcagtctgggga

SEQ ID NO: 283399 - DNA, 20 bp, synthetic construct
  source 1..20: mol_type = other DNA
ttggcagaggcagtctgggg

SEQ ID NO: 283400 - DNA, 20 bp, synthetic construct
  source 1..20: mol_type = other DNA
cttggcagaggcagtctggg

SEQ ID NO: 283401 - DNA, 20 bp, synthetic construct
  source 1..20: mol_type = other DNA
acttggcagaggcagtctgg

SEQ ID NO: 283402 - DNA, 20 bp, synthetic construct
  source 1..20: mol_type = other DNA
gacttggcagaggcagtctg

SEQ ID NO: 283403 - DNA, 20 bp, synthetic construct
  source 1..20: mol_type = other DNA
ggacttggcagaggcagtct

SEQ ID NO: 283404 - DNA, 20 bp, synthetic construct
  source 1..20: mol_type = other DNA
cggacttggcagaggcagtc

SEQ ID NO: 283405 - DNA, 20 bp, synthetic construct
  source 1..20: mol_type = other DNA
tcggacttggcagaggcagt

SEQ ID NO: 283406 - DNA, 20 bp, synthetic construct
  source 1..20: mol_type = other DNA
ttcggacttggcagaggcag

SEQ ID NO: 283407 - DNA, 20 bp, synthetic construct
  source 1..20: mol_type = other DNA
tttcggacttggcagaggca

SEQ ID NO: 283408 - DNA, 20 bp, synthetic construct
  source 1..20: mol_type = other DNA
ctttcggacttggcagaggc

SEQ ID NO: 283409 - DNA, 20 bp, synthetic construct
  source 1..20: mol_type = other DNA
actttcggacttggcagagg

SEQ ID NO: 283410 - DNA, 20 bp, synthetic construct
  source 1..20: mol_type = other DNA
cactttcggacttggcagag

SEQ ID NO: 283411 - DNA, 20 bp, synthetic construct
  source 1..20: mol_type = other DNA
ccactttcggacttggcaga

SEQ ID NO: 283412 - DNA, 20 bp, synthetic construct
  source 1..20: mol_type = other DNA
tccactttcggacttggcag

SEQ ID NO: 283413 - DNA, 20 bp, synthetic construct
  source 1..20: mol_type = other DNA
ctccactttcggacttggca

SEQ ID NO: 283414 - DNA, 20 bp, synthetic construct
  source 1..20: mol_type = other DNA
cctccactttcggacttggc

SEQ ID NO: 283415 - DNA, 20 bp, synthetic construct
  source 1..20: mol_type = other DNA
gcctccactttcggacttgg

SEQ ID NO: 283416 - DNA, 20 bp, synthetic construct
  source 1..20: mol_type = other DNA
tgcctccactttcggacttg

SEQ ID NO: 283417 - DNA, 20 bp, synthetic construct
  source 1..20: mol_type = other DNA
atgcctccactttcggactt

SEQ ID NO: 283418 - DNA, 20 bp, synthetic construct
  source 1..20: mol_type = other DNA
gatgcctccactttcggact

SEQ ID NO: 283419 - DNA, 20 bp, synthetic construct
  source 1..20: mol_type = other DNA
ggatgcctccactttcggac

SEQ ID NO: 283420 - DNA, 20 bp, synthetic construct
  source 1..20: mol_type = other DNA
aggatgcctccactttcgga

SEQ ID NO: 283421 - DNA, 20 bp, synthetic construct
  source 1..20: mol_type = other DNA
aaggatgcctccactttcgg

SEQ ID NO: 283422 - DNA, 20 bp, synthetic construct
  source 1..20: mol_type = other DNA
caaggatgcctccactttcg

SEQ ID NO: 283423 - DNA, 20 bp, synthetic construct
  source 1..20: mol_type = other DNA
gcaaggatgcctccactttc

SEQ ID NO: 283424 - DNA, 20 bp, synthetic construct
  source 1..20: mol_type = other DNA
cgcaaggatgcctccacttt

SEQ ID NO: 283425 - DNA, 20 bp, synthetic construct
  source 1..20: mol_type = other DNA
tcgcaaggatgcctccactt

SEQ ID NO: 283426 - DNA, 20 bp, synthetic construct
  source 1..20: mol_type = other DNA
ctcgcaaggatgcctccact

SEQ ID NO: 283427 - DNA, 20 bp, synthetic construct
  source 1..20: mol_type = other DNA
gctcgcaaggatgcctccac

SEQ ID NO: 283428 - DNA, 20 bp, synthetic construct
  source 1..20: mol_type = other DNA
tgctcgcaaggatgcctcca

SEQ ID NO: 283429 - DNA, 20 bp, synthetic construct
  source 1..20: mol_type = other DNA
ttgctcgcaaggatgcctcc

SEQ ID NO: 283430 - DNA, 20 bp, synthetic construct
  source 1..20: mol_type = other DNA
cttgctcgcaaggatgcctc

SEQ ID NO: 283431 - DNA, 20 bp, synthetic construct
  source 1..20: mol_type = other DNA
acttgctcgcaaggatgcct

SEQ ID NO: 283432 - DNA, 20 bp, synthetic construct
  source 1..20: mol_type = other DNA
tacttgctcgcaaggatgcc

SEQ ID NO: 283433 - DNA, 20 bp, synthetic construct
  source 1..20: mol_type = other DNA
ctacttgctcgcaaggatgc

SEQ ID NO: 283434 - DNA, 20 bp, synthetic construct
  source 1..20: mol_type = other DNA
cctacttgctcgcaaggatg

SEQ ID NO: 283435 - DNA, 20 bp, synthetic construct
  source 1..20: mol_type = other DNA
gcctacttgctcgcaaggat

SEQ ID NO: 283436 - DNA, 20 bp, synthetic construct
  source 1..20: mol_type = other DNA
cgcctacttgctcgcaagga

SEQ ID NO: 283437 - DNA, 20 bp, synthetic construct
  source 1..20: mol_type = other DNA
ccgcctacttgctcgcaagg

SEQ ID NO: 283438 - DNA, 20 bp, synthetic construct
  source 1..20: mol_type = other DNA
cccgcctacttgctcgcaag

SEQ ID NO: 283439 - DNA, 20 bp, synthetic construct
  source 1..20: mol_type = other DNA
acccgcctacttgctcgcaa

SEQ ID NO: 283440 - DNA, 20 bp, synthetic construct
  source 1..20: mol_type = other DNA
gacccgcctacttgctcgca

SEQ ID NO: 283441 - DNA, 20 bp, synthetic construct
  source 1..20: mol_type = other DNA
ggacccgcctacttgctcgc

SEQ ID NO: 283442 - DNA, 20 bp, synthetic construct
  source 1..20: mol_type = other DNA
tggacccgcctacttgctcg

SEQ ID NO: 283443 - DNA, 20 bp, synthetic construct
  source 1..20: mol_type = other DNA
ctggacccgcctacttgctc

SEQ ID NO: 283444 - DNA, 20 bp, synthetic construct
  source 1..20: mol_type = other DNA
cctggacccgcctacttgct

SEQ ID NO: 283445 - DNA, 20 bp, synthetic construct
  source 1..20: mol_type = other DNA
ccctggacccgcctacttgc

SEQ ID NO: 283446 - DNA, 20 bp, synthetic construct
  source 1..20: mol_type = other DNA
accctggacccgcctacttg

SEQ ID NO: 283447 - DNA, 20 bp, synthetic construct
  source 1..20: mol_type = other DNA
caccctggacccgcctactt

SEQ ID NO: 283448 - DNA, 20 bp, synthetic construct
  source 1..20: mol_type = other DNA
ccaccctggacccgcctact

SEQ ID NO: 283449 - DNA, 20 bp, synthetic construct
  source 1..20: mol_type = other DNA
gccaccctggacccgcctac

SEQ ID NO: 283450 - DNA, 20 bp, synthetic construct
  source 1..20: mol_type = other DNA
cgccaccctggacccgccta

SEQ ID NO: 283451 - DNA, 20 bp, synthetic construct
  source 1..20: mol_type = other DNA
gcgccaccctggacccgcct

SEQ ID NO: 283452 - DNA, 20 bp, synthetic construct
  source 1..20: mol_type = other DNA
tgcgccaccctggacccgcc

SEQ ID NO: 283453 - DNA, 20 bp, synthetic construct
  source 1..20: mol_type = other DNA
atgcgccaccctggacccgc

SEQ ID NO: 283454 - DNA, 20 bp, synthetic construct
  source 1..20: mol_type = other DNA
catgcgccaccctggacccg

SEQ ID NO: 283455 - DNA, 20 bp, synthetic construct
  source 1..20: mol_type = other DNA
acatgcgccaccctggaccc

SEQ ID NO: 283456 - DNA, 20 bp, synthetic construct
  source 1..20: mol_type = other DNA
gacatgcgccaccctggacc

SEQ ID NO: 283457 - DNA, 20 bp, synthetic construct
  source 1..20: mol_type = other DNA
tgacatgcgccaccctggac

SEQ ID NO: 283458 - DNA, 20 bp, synthetic construct
  source 1..20: mol_type = other DNA
gtgacatgcgccaccctgga

SEQ ID NO: 283459 - DNA, 20 bp, synthetic construct
  source 1..20: mol_type = other DNA
agtgacatgcgccaccctgg

SEQ ID NO: 283460 - DNA, 20 bp, synthetic construct
  source 1..20: mol_type = other DNA
gagtgacatgcgccaccctg

SEQ ID NO: 283461 - DNA, 20 bp, synthetic construct
  source 1..20: mol_type = other DNA
tgagtgacatgcgccaccct

SEQ ID NO: 283462 - DNA, 20 bp, synthetic construct
  source 1..20: mol_type = other DNA
atgagtgacatgcgccaccc

SEQ ID NO: 283463 - DNA, 20 bp, synthetic construct
  source 1..20: mol_type = other DNA
gatgagtgacatgcgccacc

SEQ ID NO: 283464 - DNA, 20 bp, synthetic construct
  source 1..20: mol_type = other DNA
cgatgagtgacatgcgccac

SEQ ID NO: 283465 - DNA, 20 bp, synthetic construct
  source 1..20: mol_type = other DNA
tcgatgagtgacatgcgcca

SEQ ID NO: 283466 - DNA, 20 bp, synthetic construct
  source 1..20: mol_type = other DNA
ttcgatgagtgacatgcgcc

SEQ ID NO: 283467 - DNA, 20 bp, synthetic construct
  source 1..20: mol_type = other DNA
tttcgatgagtgacatgcgc

SEQ ID NO: 283468 - DNA, 20 bp, synthetic construct
  source 1..20: mol_type = other DNA
ctttcgatgagtgacatgcg

SEQ ID NO: 283469 - DNA, 20 bp, synthetic construct
  source 1..20: mol_type = other DNA
actttcgatgagtgacatgc

SEQ ID NO: 283470 - DNA, 20 bp, synthetic construct
  source 1..20: mol_type = other DNA
cactttcgatgagtgacatg

SEQ ID NO: 283471 - DNA, 20 bp, synthetic construct
  source 1..20: mol_type = other DNA
ccactttcgatgagtgacat

SEQ ID NO: 283472 - DNA, 20 bp, synthetic construct
  source 1..20: mol_type = other DNA
tccactttcgatgagtgaca

SEQ ID NO: 283473 - DNA, 20 bp, synthetic construct
  source 1..20: mol_type = other DNA
ctccactttcgatgagtgac

SEQ ID NO: 283474 - DNA, 20 bp, synthetic construct
  source 1..20: mol_type = other DNA
cctccactttcgatgagtga

SEQ ID NO: 283475 - DNA, 20 bp, synthetic construct
  source 1..20: mol_type = other DNA
gcctccactttcgatgagtg

SEQ ID NO: 283476 - DNA, 20 bp, synthetic construct
  source 1..20: mol_type = other DNA
cgcctccactttcgatgagt

SEQ ID NO: 283477 - DNA, 20 bp, synthetic construct
  source 1..20: mol_type = other DNA
acgcctccactttcgatgag

SEQ ID NO: 283478 - DNA, 20 bp, synthetic construct
  source 1..20: mol_type = other DNA
gacgcctccactttcgatga

SEQ ID NO: 283479 - DNA, 20 bp, synthetic construct
  source 1..20: mol_type = other DNA
ggacgcctccactttcgatg

SEQ ID NO: 283480 - DNA, 20 bp, synthetic construct
  source 1..20: mol_type = other DNA
aggacgcctccactttcgat

SEQ ID NO: 283481 - DNA, 20 bp, synthetic construct
  source 1..20: mol_type = other DNA
aaggacgcctccactttcga

SEQ ID NO: 283482 - DNA, 20 bp, synthetic construct
  source 1..20: mol_type = other DNA
caaggacgcctccactttcg

SEQ ID NO: 283483 - DNA, 20 bp, synthetic construct
  source 1..20: mol_type = other DNA
gcaaggacgcctccactttc

SEQ ID NO: 283484 - DNA, 20 bp, synthetic construct
  source 1..20: mol_type = other DNA
cgcaaggacgcctccacttt

SEQ ID NO: 283485 - DNA, 20 bp, synthetic construct
  source 1..20: mol_type = other DNA
tcgcaaggacgcctccactt

SEQ ID NO: 283486 - DNA, 20 bp, synthetic construct
  source 1..20: mol_type = other DNA
ctcgcaaggacgcctccact

SEQ ID NO: 283487 - DNA, 20 bp, synthetic construct
  source 1..20: mol_type = other DNA
gctcgcaaggacgcctccac

SEQ ID NO: 283488 - DNA, 20 bp, synthetic construct
  source 1..20: mol_type = other DNA
tgctcgcaaggacgcctcca

SEQ ID NO: 283489 - DNA, 20 bp, synthetic construct
  source 1..20: mol_type = other DNA
ttgctcgcaaggacgcctcc

SEQ ID NO: 283490 - DNA, 20 bp, synthetic construct
  source 1..20: mol_type = other DNA
cttgctcgcaaggacgcctc

SEQ ID NO: 283491 - DNA, 20 bp, synthetic construct
  source 1..20: mol_type = other DNA
gcttgctcgcaaggacgcct

SEQ ID NO: 283492 - DNA, 20 bp, synthetic construct
  source 1..20: mol_type = other DNA
tgcttgctcgcaaggacgcc

SEQ ID NO: 283493 - DNA, 20 bp, synthetic construct
  source 1..20: mol_type = other DNA
ctgcttgctcgcaaggacgc

SEQ ID NO: 283494 - DNA, 20 bp, synthetic construct
  source 1..20: mol_type = other DNA
cctgcttgctcgcaaggacg

SEQ ID NO: 283495 - DNA, 20 bp, synthetic construct
  source 1..20: mol_type = other DNA
gcctgcttgctcgcaaggac

SEQ ID NO: 283496 - DNA, 20 bp, synthetic construct
  source 1..20: mol_type = other DNA
cgcctgcttgctcgcaagga

SEQ ID NO: 283497 - DNA, 20 bp, synthetic construct
  source 1..20: mol_type = other DNA
ccgcctgcttgctcgcaagg

SEQ ID NO: 283498 - DNA, 20 bp, synthetic construct
  source 1..20: mol_type = other DNA
cccgcctgcttgctcgcaag

SEQ ID NO: 283499 - DNA, 20 bp, synthetic construct
  source 1..20: mol_type = other DNA
acccgcctgcttgctcgcaa

SEQ ID NO: 283500 - DNA, 20 bp, synthetic construct
  source 1..20: mol_type = other DNA
gacccgcctgcttgctcgca

SEQ ID NO: 283501 - DNA, 20 bp, synthetic construct
  source 1..20: mol_type = other DNA
ggacccgcctgcttgctcgc

SEQ ID NO: 283502 - DNA, 20 bp, synthetic construct
  source 1..20: mol_type = other DNA
tggacccgcctgcttgctcg

SEQ ID NO: 283503 - DNA, 20 bp, synthetic construct
  source 1..20: mol_type = other DNA
ctggacccgcctgcttgctc

SEQ ID NO: 283504 - DNA, 20 bp, synthetic construct
  source 1..20: mol_type = other DNA
cctggacccgcctgcttgct

SEQ ID NO: 283505 - DNA, 20 bp, synthetic construct
  source 1..20: mol_type = other DNA
ccctggacccgcctgcttgc

SEQ ID NO: 283506 - DNA, 20 bp, synthetic construct
  source 1..20: mol_type = other DNA
accctggacccgcctgcttg

SEQ ID NO: 283507 - DNA, 20 bp, synthetic construct
  source 1..20: mol_type = other DNA
caccctggacccgcctgctt

SEQ ID NO: 283508 - DNA, 20 bp, synthetic construct
  source 1..20: mol_type = other DNA
ccaccctggacccgcctgct

SEQ ID NO: 283509 - DNA, 20 bp, synthetic construct
  source 1..20: mol_type = other DNA
gccaccctggacccgcctgc

SEQ ID NO: 283510 - DNA, 20 bp, synthetic construct
  source 1..20: mol_type = other DNA
cgccaccctggacccgcctg

SEQ ID NO: 283511 - DNA, 20 bp, synthetic construct
  source 1..20: mol_type = other DNA
acgccaccctggacccgcct

SEQ ID NO: 283512 - DNA, 20 bp, synthetic construct
  source 1..20: mol_type = other DNA
cacgccaccctggacccgcc

SEQ ID NO: 283513 - DNA, 20 bp, synthetic construct
  source 1..20: mol_type = other DNA
acacgccaccctggacccgc

SEQ ID NO: 283514 - DNA, 20 bp, synthetic construct
  source 1..20: mol_type = other DNA
gacacgccaccctggacccg

SEQ ID NO: 283515 - DNA, 20 bp, synthetic construct
  source 1..20: mol_type = other DNA
tgacacgccaccctggaccc

SEQ ID NO: 283516 - DNA, 20 bp, synthetic construct
  source 1..20: mol_type = other DNA
gtgacacgccaccctggacc

SEQ ID NO: 283517 - DNA, 20 bp, synthetic construct
  source 1..20: mol_type = other DNA
agtgacacgccaccctggac

SEQ ID NO: 283518 - DNA, 20 bp, synthetic construct
  source 1..20: mol_type = other DNA
gagtgacacgccaccctgga

SEQ ID NO: 283519 - DNA, 20 bp, synthetic construct
  source 1..20: mol_type = other DNA
tgagtgacacgccaccctgg

SEQ ID NO: 283520 - DNA, 20 bp, synthetic construct
  source 1..20: mol_type = other DNA
atgagtgacacgccaccctg

SEQ ID NO: 283521 - DNA, 20 bp, synthetic construct
  source 1..20: mol_type = other DNA
gatgagtgacacgccaccct

SEQ ID NO: 283522 - DNA, 20 bp, synthetic construct
  source 1..20: mol_type = other DNA
ggatgagtgacacgccaccc

SEQ ID NO: 283523 - DNA, 20 bp, synthetic construct
  source 1..20: mol_type = other DNA
aggatgagtgacacgccacc

SEQ ID NO: 283524 - DNA, 20 bp, synthetic construct
  source 1..20: mol_type = other DNA
aaggatgagtgacacgccac

SEQ ID NO: 283525 - DNA, 20 bp, synthetic construct
  source 1..20: mol_type = other DNA
aaaggatgagtgacacgcca

SEQ ID NO: 283526 - DNA, 20 bp, synthetic construct
  source 1..20: mol_type = other DNA
aaaaggatgagtgacacgcc

SEQ ID NO: 283527 - DNA, 20 bp, synthetic construct
  source 1..20: mol_type = other DNA
aaaaaggatgagtgacacgc

SEQ ID NO: 283528 - DNA, 20 bp, synthetic construct
  source 1..20: mol_type = other DNA
aaaaaaggatgagtgacacg

SEQ ID NO: 283529 - DNA, 20 bp, synthetic construct
  source 1..20: mol_type = other DNA
gaaaaaaggatgagtgacac

SEQ ID NO: 283530 - DNA, 20 bp, synthetic construct
  source 1..20: mol_type = other DNA
agaaaaaaggatgagtgaca

SEQ ID NO: 283531 - DNA, 20 bp, synthetic construct
  source 1..20: mol_type = other DNA
cagaaaaaaggatgagtgac

SEQ ID NO: 283532 - DNA, 20 bp, synthetic construct
  source 1..20: mol_type = other DNA
ccagaaaaaaggatgagtga

SEQ ID NO: 283533 - DNA, 20 bp, synthetic construct
  source 1..20: mol_type = other DNA
gccagaaaaaaggatgagtg

SEQ ID NO: 283534 - DNA, 20 bp, synthetic construct
  source 1..20: mol_type = other DNA
agccagaaaaaaggatgagt

SEQ ID NO: 283535 - DNA, 20 bp, synthetic construct
  source 1..20: mol_type = other DNA
tagccagaaaaaaggatgag

SEQ ID NO: 283536 - DNA, 20 bp, synthetic construct
  source 1..20: mol_type = other DNA
gtagccagaaaaaaggatga

SEQ ID NO: 283537 - DNA, 20 bp, synthetic construct
  source 1..20: mol_type = other DNA
ggtagccagaaaaaaggatg

SEQ ID NO: 283538 - DNA, 20 bp, synthetic construct
  source 1..20: mol_type = other DNA
tggtagccagaaaaaaggat

SEQ ID NO: 283539 - DNA, 20 bp, synthetic construct
  source 1..20: mol_type = other DNA
ttggtagccagaaaaaagga

SEQ ID NO: 283540 - DNA, 20 bp, synthetic construct
  source 1..20: mol_type = other DNA
tttggtagccagaaaaaagg

SEQ ID NO: 283541 - DNA, 20 bp, synthetic construct
  source 1..20: mol_type = other DNA
ctttggtagccagaaaaaag

SEQ ID NO: 283542 - DNA, 20 bp, synthetic construct
  source 1..20: mol_type = other DNA
cctttggtagccagaaaaaa

SEQ ID NO: 283543 - DNA, 20 bp, synthetic construct
  source 1..20: mol_type = other DNA
acctttggtagccagaaaaa

SEQ ID NO: 283544 - DNA, 20 bp, synthetic construct
  source 1..20: mol_type = other DNA
cacctttggtagccagaaaa

SEQ ID NO: 283545 - DNA, 20 bp, synthetic construct
  source 1..20: mol_type = other DNA
gcacctttggtagccagaaa

SEQ ID NO: 283546 - DNA, 20 bp, synthetic construct
  source 1..20: mol_type = other DNA
tgcacctttggtagccagaa

SEQ ID NO: 283547 - DNA, 20 bp, synthetic construct
  source 1..20: mol_type = other DNA
ctgcacctttggtagccaga

SEQ ID NO: 283548 - DNA, 20 bp, synthetic construct
  source 1..20: mol_type = other DNA
tctgcacctttggtagccag

SEQ ID NO: 283549 - DNA, 20 bp, synthetic construct
  source 1..20: mol_type = other DNA
atctgcacctttggtagcca

SEQ ID NO: 283550 - DNA, 20 bp, synthetic construct
  source 1..20: mol_type = other DNA
tatctgcacctttggtagcc

SEQ ID NO: 283551 - DNA, 20 bp, synthetic construct
  source 1..20: mol_type = other DNA
ttatctgcacctttggtagc

SEQ ID NO: 283552 - DNA, 20 bp, synthetic construct
  source 1..20: mol_type = other DNA
attatctgcacctttggtag

SEQ ID NO: 283553 - DNA, 20 bp, synthetic construct
  source 1..20: mol_type = other DNA
aattatctgcacctttggta

SEQ ID NO: 283554 - DNA, 20 bp, synthetic construct
  source 1..20: mol_type = other DNA
taattatctgcacctttggt

SEQ ID NO: 283555 - DNA, 20 bp, synthetic construct
  source 1..20: mol_type = other DNA
ttaattatctgcacctttgg

SEQ ID NO: 283556 - DNA, 20 bp, synthetic construct
  source 1..20: mol_type = other DNA
attaattatctgcacctttg

SEQ ID NO: 283557 - DNA, 20 bp, synthetic construct
  source 1..20: mol_type = other DNA
tattaattatctgcaccttt

SEQ ID NO: 283558 - DNA, 20 bp, synthetic construct
  source 1..20: mol_type = other DNA
ttattaattatctgcacctt

SEQ ID NO: 283559 - DNA, 20 bp, synthetic construct
  source 1..20: mol_type = other DNA
cttattaattatctgcacct

SEQ ID NO: 283560 - DNA, 20 bp, synthetic construct
  source 1..20: mol_type = other DNA
tcttattaattatctgcacc

SEQ ID NO: 283561 - DNA, 20 bp, synthetic construct
  source 1..20: mol_type = other DNA
ttcttattaattatctgcac

SEQ ID NO: 283562 - DNA, 20 bp, synthetic construct
  source 1..20: mol_type = other DNA
cttcttattaattatctgca

SEQ ID NO: 283563 - DNA, 20 bp, synthetic construct
  source 1..20: mol_type = other DNA
gcttcttattaattatctgc

SEQ ID NO: 283564 - DNA, 20 bp, synthetic construct
  source 1..20: mol_type = other DNA
agcttcttattaattatctg

SEQ ID NO: 283565 - DNA, 20 bp, synthetic construct
  source 1..20: mol_type = other DNA
cagcttcttattaattatct

SEQ ID NO: 283566 - DNA, 20 bp, synthetic construct
  source 1..20: mol_type = other DNA
ccagcttcttattaattatc

SEQ ID NO: 283567 - DNA, 20 bp, synthetic construct
  source 1..20: mol_type = other DNA
tccagcttcttattaattat

SEQ ID NO: 283568 - DNA, 20 bp, synthetic construct
  source 1..20: mol_type = other DNA
atccagcttcttattaatta

SEQ ID NO: 283569 - DNA, 20 bp, synthetic construct
  source 1..20: mol_type = other DNA
gatccagcttcttattaatt

SEQ ID NO: 283570 - DNA, 20 bp, synthetic construct
  source 1..20: mol_type = other DNA
agatccagcttcttattaat

SEQ ID NO: 283571 - DNA, 20 bp, synthetic construct
  source 1..20: mol_type = other DNA
aagatccagcttcttattaa

SEQ ID NO: 283572 - DNA, 20 bp, synthetic construct
  source 1..20: mol_type = other DNA
taagatccagcttcttatta

SEQ ID NO: 283573 - DNA, 20 bp, synthetic construct
  source 1..20: mol_type = other DNA
ctaagatccagcttcttatt

SEQ ID NO: 283574 - DNA, 20 bp, synthetic construct
  source 1..20: mol_type = other DNA
gctaagatccagcttcttat

SEQ ID NO: 283575 - DNA, 20 bp, synthetic construct
  source 1..20: mol_type = other DNA
tgctaagatccagcttctta

SEQ ID NO: 283576 - DNA, 20 bp, synthetic construct
  source 1..20: mol_type = other DNA
ttgctaagatccagcttctt

SEQ ID NO: 283577 - DNA, 20 bp, synthetic construct
  source 1..20: mol_type = other DNA
gttgctaagatccagcttct

SEQ ID NO: 283578 - DNA, 20 bp, synthetic construct
  source 1..20: mol_type = other DNA
cgttgctaagatccagcttc

SEQ ID NO: 283579 - DNA, 20 bp, synthetic construct
  source 1..20: mol_type = other DNA
acgttgctaagatccagctt

SEQ ID NO: 283580 - DNA, 20 bp, synthetic construct
  source 1..20: mol_type = other DNA
gacgttgctaagatccagct

SEQ ID NO: 283581 - DNA, 20 bp, synthetic construct
  source 1..20: mol_type = other DNA
ggacgttgctaagatccagc

SEQ ID NO: 283582 - DNA, 20 bp, synthetic construct
  source 1..20: mol_type = other DNA
tggacgttgctaagatccag

SEQ ID NO: 283583 - DNA, 20 bp, synthetic construct
  source 1..20: mol_type = other DNA
ctggacgttgctaagatcca

SEQ ID NO: 283584 - DNA, 20 bp, synthetic construct
  source 1..20: mol_type = other DNA
actggacgttgctaagatcc

SEQ ID NO: 283585 - DNA, 20 bp, synthetic construct
  source 1..20: mol_type = other DNA
gactggacgttgctaagatc

SEQ ID NO: 283586 - DNA, 20 bp, synthetic construct
  source 1..20: mol_type = other DNA
ggactggacgttgctaagat

SEQ ID NO: 283587 - DNA, 20 bp, synthetic construct
  source 1..20: mol_type = other DNA
tggactggacgttgctaaga

SEQ ID NO: 283588 - DNA, 20 bp, synthetic construct
  source 1..20: mol_type = other DNA
ttggactggacgttgctaag

SEQ ID NO: 283589 - DNA, 20 bp, synthetic construct
  source 1..20: mol_type = other DNA
cttggactggacgttgctaa

SEQ ID NO: 283590 - DNA, 20 bp, synthetic construct
  source 1..20: mol_type = other DNA
acttggactggacgttgcta

SEQ ID NO: 283591 - DNA, 20 bp, synthetic construct
  source 1..20: mol_type = other DNA
cacttggactggacgttgct

SEQ ID NO: 283592 - DNA, 20 bp, synthetic construct
  source 1..20: mol_type = other DNA
acacttggactggacgttgc

SEQ ID NO: 283593 - DNA, 20 bp, synthetic construct
  source 1..20: mol_type = other DNA
cacacttggactggacgttg

SEQ ID NO: 283594 - DNA, 20 bp, synthetic construct
  source 1..20: mol_type = other DNA
ccacacttggactggacgtt

SEQ ID NO: 283595 - DNA, 20 bp, synthetic construct
  source 1..20: mol_type = other DNA
gccacacttggactggacgt

SEQ ID NO: 283596 - DNA, 20 bp, synthetic construct
  source 1..20: mol_type = other DNA
agccacacttggactggacg

SEQ ID NO: 283597 - DNA, 20 bp, synthetic construct
  source 1..20: mol_type = other DNA
gagccacacttggactggac

SEQ ID NO: 283598 - DNA, 20 bp, synthetic construct
  source 1..20: mol_type = other DNA
tgagccacacttggactgga

SEQ ID NO: 283599 - DNA, 20 bp, synthetic construct
  source 1..20: mol_type = other DNA
ttgagccacacttggactgg

SEQ ID NO: 283600 - DNA, 20 bp, synthetic construct
  source 1..20: mol_type = other DNA
tttgagccacacttggactg

SEQ ID NO: 283601 - DNA, 20 bp, synthetic construct
  source 1..20: mol_type = other DNA
ctttgagccacacttggact

SEQ ID NO: 283602 - DNA, 20 bp, synthetic construct
  source 1..20: mol_type = other DNA
cctttgagccacacttggac

SEQ ID NO: 283603 - DNA, 20 bp, synthetic construct
  source 1..20: mol_type = other DNA
tcctttgagccacacttgga

SEQ ID NO: 283604 - DNA, 20 bp, synthetic construct
  source 1..20: mol_type = other DNA
atcctttgagccacacttgg

SEQ ID NO: 283605 - DNA, 20 bp, synthetic construct
  source 1..20: mol_type = other DNA
tatcctttgagccacacttg

SEQ ID NO: 283606 - DNA, 20 bp, synthetic construct
  source 1..20: mol_type = other DNA
ttatcctttgagccacactt

SEQ ID NO: 283607 - DNA, 20 bp, synthetic construct
  source 1..20: mol_type = other DNA
attatcctttgagccacact

SEQ ID NO: 283608 - DNA, 20 bp, synthetic construct
  source 1..20: mol_type = other DNA
tattatcctttgagccacac

SEQ ID NO: 283609 - DNA, 20 bp, synthetic construct
  source 1..20: mol_type = other DNA
atattatcctttgagccaca

SEQ ID NO: 283610 - DNA, 20 bp, synthetic construct
  source 1..20: mol_type = other DNA
gatattatcctttgagccac

SEQ ID NO: 283611 - DNA, 20 bp, synthetic construct
  source 1..20: mol_type = other DNA
tgatattatcctttgagcca

SEQ ID NO: 283612 - DNA, 20 bp, synthetic construct
  source 1..20: mol_type = other DNA
ttgatattatcctttgagcc

SEQ ID NO: 283613 - DNA, 20 bp, synthetic construct
  source 1..20: mol_type = other DNA
tttgatattatcctttgagc

SEQ ID NO: 283614 - DNA, 20 bp, synthetic construct
  source 1..20: mol_type = other DNA
gtttgatattatcctttgag

SEQ ID NO: 283615 - DNA, 20 bp, synthetic construct
  source 1..20: mol_type = other DNA
tgtttgatattatcctttga

SEQ ID NO: 283616 - DNA, 20 bp, synthetic construct
  source 1..20: mol_type = other DNA
gtgtttgatattatcctttg

SEQ ID NO: 283617 - DNA, 20 bp, synthetic construct
  source 1..20: mol_type = other DNA
cgtgtttgatattatccttt

SEQ ID NO: 283618 - DNA, 20 bp, synthetic construct
  source 1..20: mol_type = other DNA
acgtgtttgatattatcctt

SEQ ID NO: 283619 - DNA, 20 bp, synthetic construct
  source 1..20: mol_type = other DNA
gacgtgtttgatattatcct

SEQ ID NO: 283620 - DNA, 20 bp, synthetic construct
  source 1..20: mol_type = other DNA
ggacgtgtttgatattatcc

SEQ ID NO: 283621 - DNA, 20 bp, synthetic construct
  source 1..20: mol_type = other DNA
gggacgtgtttgatattatc

SEQ ID NO: 283622 - DNA, 20 bp, synthetic construct
  source 1..20: mol_type = other DNA
cgggacgtgtttgatattat

SEQ ID NO: 283623 - DNA, 20 bp, synthetic construct
  source 1..20: mol_type = other DNA
ccgggacgtgtttgatatta

SEQ ID NO: 283624 - DNA, 20 bp, synthetic construct
  source 1..20: mol_type = other DNA
cccgggacgtgtttgatatt

SEQ ID NO: 283625 - DNA, 20 bp, synthetic construct
  source 1..20: mol_type = other DNA
tcccgggacgtgtttgatat

SEQ ID NO: 283626 - DNA, 20 bp, synthetic construct
  source 1..20: mol_type = other DNA
ctcccgggacgtgtttgata

SEQ ID NO: 283627 - DNA, 20 bp, synthetic construct
  source 1..20: mol_type = other DNA
cctcccgggacgtgtttgat

SEQ ID NO: 283628 - DNA, 20 bp, synthetic construct
  source 1..20: mol_type = other DNA
gcctcccgggacgtgtttga

SEQ ID NO: 283629 - DNA, 20 bp, synthetic construct
  source 1..20: mol_type = other DNA
cgcctcccgggacgtgtttg

SEQ ID NO: 283630 - DNA, 20 bp, synthetic construct
  source 1..20: mol_type = other DNA
ccgcctcccgggacgtgttt

SEQ ID NO: 283631 - DNA, 20 bp, synthetic construct
  source 1..20: mol_type = other DNA
gccgcctcccgggacgtgtt

SEQ ID NO: 283632 - DNA, 20 bp, synthetic construct
  source 1..20: mol_type = other DNA
tgccgcctcccgggacgtgt

SEQ ID NO: 283633 - DNA, 20 bp, synthetic construct
  source 1..20: mol_type = other DNA
ctgccgcctcccgggacgtg

SEQ ID NO: 283634 - DNA, 20 bp, synthetic construct
  source 1..20: mol_type = other DNA
actgccgcctcccgggacgt

SEQ ID NO: 283635 - DNA, 20 bp, synthetic construct
  source 1..20: mol_type = other DNA
cactgccgcctcccgggacg

SEQ ID NO: 283636 - DNA, 20 bp, synthetic construct
  source 1..20: mol_type = other DNA
acactgccgcctcccgggac

SEQ ID NO: 283637 - DNA, 20 bp, synthetic construct
  source 1..20: mol_type = other DNA
cacactgccgcctcccggga

SEQ ID NO: 283638 - DNA, 20 bp, synthetic construct
  source 1..20: mol_type = other DNA
tcacactgccgcctcccggg

SEQ ID NO: 283639 - DNA, 20 bp, synthetic construct
  source 1..20: mol_type = other DNA
ctcacactgccgcctcccgg

SEQ ID NO: 283640 - DNA, 20 bp, synthetic construct
  source 1..20: mol_type = other DNA
actcacactgccgcctcccg

SEQ ID NO: 283641 - DNA, 20 bp, synthetic construct
  source 1..20: mol_type = other DNA
tactcacactgccgcctccc

SEQ ID NO: 283642 - DNA, 20 bp, synthetic construct
  source 1..20: mol_type = other DNA
gtactcacactgccgcctcc

SEQ ID NO: 283643 - DNA, 20 bp, synthetic construct
  source 1..20: mol_type = other DNA
ggtactcacactgccgcctc

SEQ ID NO: 283644 - DNA, 20 bp, synthetic construct
  source 1..20: mol_type = other DNA
aggtactcacactgccgcct

SEQ ID NO: 283645 - DNA, 20 bp, synthetic construct
  source 1..20: mol_type = other DNA
aaggtactcacactgccgcc

SEQ ID NO: 283646 - DNA, 20 bp, synthetic construct
  source 1..20: mol_type = other DNA
gaaggtactcacactgccgc

SEQ ID NO: 283647 - DNA, 20 bp, synthetic construct
  source 1..20: mol_type = other DNA
tgaaggtactcacactgccg

SEQ ID NO: 283648 - DNA, 20 bp, synthetic construct
  source 1..20: mol_type = other DNA
gtgaaggtactcacactgcc

SEQ ID NO: 283649 - DNA, 20 bp, synthetic construct
  source 1..20: mol_type = other DNA
tgtgaaggtactcacactgc

SEQ ID NO: 283650 - DNA, 20 bp, synthetic construct
  source 1..20: mol_type = other DNA
gtgtgaaggtactcacactg

SEQ ID NO: 283651 - DNA, 20 bp, synthetic construct
  source 1..20: mol_type = other DNA
cgtgtgaaggtactcacact

SEQ ID NO: 283652 - DNA, 20 bp, synthetic construct
  source 1..20: mol_type = other DNA
acgtgtgaaggtactcacac

SEQ ID NO: 283653 - DNA, 20 bp, synthetic construct
  source 1..20: mol_type = other DNA
gacgtgtgaaggtactcaca

SEQ ID NO: 283654 - DNA, 20 bp, synthetic construct
  source 1..20: mol_type = other DNA
ggacgtgtgaaggtactcac

SEQ ID NO: 283655 - DNA, 20 bp, synthetic construct
  source 1..20: mol_type = other DNA
gggacgtgtgaaggtactca

SEQ ID NO: 283656 - DNA, 20 bp, synthetic construct
  source 1..20: mol_type = other DNA
tgggacgtgtgaaggtactc

SEQ ID NO: 283657 - DNA, 20 bp, synthetic construct
  source 1..20: mol_type = other DNA
atgggacgtgtgaaggtact

SEQ ID NO: 283658 - DNA, 20 bp, synthetic construct
  source 1..20: mol_type = other DNA
catgggacgtgtgaaggtac

SEQ ID NO: 283659 - DNA, 20 bp, synthetic construct
  source 1..20: mol_type = other DNA
gcatgggacgtgtgaaggta

SEQ ID NO: 283660 - DNA, 20 bp, synthetic construct
  source 1..20: mol_type = other DNA
cgcatgggacgtgtgaaggt

SEQ ID NO: 283661 - DNA, 20 bp, synthetic construct
  source 1..20: mol_type = other DNA
gcgcatgggacgtgtgaagg

SEQ ID NO: 283662 - DNA, 20 bp, synthetic construct
  source 1..20: mol_type = other DNA
ggcgcatgggacgtgtgaag

SEQ ID NO: 283663 - DNA, 20 bp, synthetic construct
  source 1..20: mol_type = other DNA
cggcgcatgggacgtgtgaa

SEQ ID NO: 283664 - DNA, 20 bp, synthetic construct
  source 1..20: mol_type = other DNA
acggcgcatgggacgtgtga

SEQ ID NO: 283665 - DNA, 20 bp, synthetic construct
  source 1..20: mol_type = other DNA
cacggcgcatgggacgtgtg

SEQ ID NO: 283666 - DNA, 20 bp, synthetic construct
  source 1..20: mol_type = other DNA
gcacggcgcatgggacgtgt

SEQ ID NO: 283667 - DNA, 20 bp, synthetic construct
  source 1..20: mol_type = other DNA
agcacggcgcatgggacgtg

SEQ ID NO: 283668 - DNA, 20 bp, synthetic construct
  source 1..20: mol_type = other DNA
cagcacggcgcatgggacgt

SEQ ID NO: 283669 - DNA, 20 bp, synthetic construct
  source 1..20: mol_type = other DNA
acagcacggcgcatgggacg

SEQ ID NO: 283670 - DNA, 20 bp, synthetic construct
  source 1..20: mol_type = other DNA
cacagcacggcgcatgggac

SEQ ID NO: 283671 - DNA, 20 bp, synthetic construct
  source 1..20: mol_type = other DNA
ccacagcacggcgcatggga

SEQ ID NO: 283672 - DNA, 20 bp, synthetic construct
  source 1..20: mol_type = other DNA
gccacagcacggcgcatggg

SEQ ID NO: 283673 - DNA, 20 bp, synthetic construct
  source 1..20: mol_type = other DNA
agccacagcacggcgcatgg

SEQ ID NO: 283674 - DNA, 20 bp, synthetic construct
  source 1..20: mol_type = other DNA
aagccacagcacggcgcatg

SEQ ID NO: 283675 - DNA, 20 bp, synthetic construct
  source 1..20: mol_type = other DNA
caagccacagcacggcgcat

SEQ ID NO: 283676 - DNA, 20 bp, synthetic construct
  source 1..20: mol_type = other DNA
tcaagccacagcacggcgca

SEQ ID NO: 283677 - DNA, 20 bp, synthetic construct
  source 1..20: mol_type = other DNA
ttcaagccacagcacggcgc

SEQ ID NO: 283678 - DNA, 20 bp, synthetic construct
  source 1..20: mol_type = other DNA
attcaagccacagcacggcg

SEQ ID NO: 283679 - DNA, 20 bp, synthetic construct
  source 1..20: mol_type = other DNA
aattcaagccacagcacggc

SEQ ID NO: 283680 - DNA, 20 bp, synthetic construct
  source 1..20: mol_type = other DNA
taattcaagccacagcacgg

SEQ ID NO: 283681 - DNA, 20 bp, synthetic construct
  source 1..20: mol_type = other DNA
ataattcaagccacagcacg

SEQ ID NO: 283682 - DNA, 20 bp, synthetic construct
  source 1..20: mol_type = other DNA
aataattcaagccacagcac

SEQ ID NO: 283683 - DNA, 20 bp, synthetic construct
  source 1..20: mol_type = other DNA
taataattcaagccacagca

SEQ ID NO: 283684 - DNA, 20 bp, synthetic construct
  source 1..20: mol_type = other DNA
ctaataattcaagccacagc

SEQ ID NO: 283685 - DNA, 20 bp, synthetic construct
  source 1..20: mol_type = other DNA
cctaataattcaagccacag

SEQ ID NO: 283686 - DNA, 20 bp, synthetic construct
  source 1..20: mol_type = other DNA
tcctaataattcaagccaca

SEQ ID NO: 283687 - DNA, 20 bp, synthetic construct
  source 1..20: mol_type = other DNA
ttcctaataattcaagccac

SEQ ID NO: 283688 - DNA, 20 bp, synthetic construct
  source 1..20: mol_type = other DNA
cttcctaataattcaagcca

SEQ ID NO: 283689 - DNA, 20 bp, synthetic construct
  source 1..20: mol_type = other DNA
acttcctaataattcaagcc

SEQ ID NO: 283690 - DNA, 20 bp, synthetic construct
  source 1..20: mol_type = other DNA
cacttcctaataattcaagc

SEQ ID NO: 283691 - DNA, 20 bp, synthetic construct
  source 1..20: mol_type = other DNA
ccacttcctaataattcaag

SEQ ID NO: 283692 - DNA, 20 bp, synthetic construct
  source 1..20: mol_type = other DNA
accacttcctaataattcaa

SEQ ID NO: 283693 - DNA, 20 bp, synthetic construct
  source 1..20: mol_type = other DNA
caccacttcctaataattca

SEQ ID NO: 283694 - DNA, 20 bp, synthetic construct
  source 1..20: mol_type = other DNA
acaccacttcctaataattc

SEQ ID NO: 283695 - DNA, 20 bp, synthetic construct
  source 1..20: mol_type = other DNA
cacaccacttcctaataatt

SEQ ID NO: 283696 - DNA, 20 bp, synthetic construct
  source 1..20: mol_type = other DNA
tcacaccacttcctaataat

SEQ ID NO: 283697 - DNA, 20 bp, synthetic construct
  source 1..20: mol_type = other DNA
ctcacaccacttcctaataa

SEQ ID NO: 283698 - DNA, 20 bp, synthetic construct
  source 1..20: mol_type = other DNA
actcacaccacttcctaata

SEQ ID NO: 283699 - DNA, 20 bp, synthetic construct
  source 1..20: mol_type = other DNA
cactcacaccacttcctaat

SEQ ID NO: 283700 - DNA, 20 bp, synthetic construct
  source 1..20: mol_type = other DNA
gcactcacaccacttcctaa

SEQ ID NO: 283701 - DNA, 20 bp, synthetic construct
  source 1..20: mol_type = other DNA
cgcactcacaccacttccta

SEQ ID NO: 283702 - DNA, 20 bp, synthetic construct
  source 1..20: mol_type = other DNA
acgcactcacaccacttcct

SEQ ID NO: 283703 - DNA, 20 bp, synthetic construct
  source 1..20: mol_type = other DNA
tacgcactcacaccacttcc

SEQ ID NO: 283704 - DNA, 20 bp, synthetic construct
  source 1..20: mol_type = other DNA
gtacgcactcacaccacttc

SEQ ID NO: 283705 - DNA, 20 bp, synthetic construct
  source 1..20: mol_type = other DNA
tgtacgcactcacaccactt

SEQ ID NO: 283706 - DNA, 20 bp, synthetic construct
  source 1..20: mol_type = other DNA
gtgtacgcactcacaccact

SEQ ID NO: 283707 - DNA, 20 bp, synthetic construct
  source 1..20: mol_type = other DNA
agtgtacgcactcacaccac

SEQ ID NO: 283708 - DNA, 20 bp, synthetic construct
  source 1..20: mol_type = other DNA
aagtgtacgcactcacacca

SEQ ID NO: 283709 - DNA, 20 bp, synthetic construct
  source 1..20: mol_type = other DNA
caagtgtacgcactcacacc

SEQ ID NO: 283710 - DNA, 20 bp, synthetic construct
  source 1..20: mol_type = other DNA
gcaagtgtacgcactcacac

SEQ ID NO: 283711 - DNA, 20 bp, synthetic construct
  source 1..20: mol_type = other DNA
cgcaagtgtacgcactcaca

SEQ ID NO: 283712 - DNA, 20 bp, synthetic construct
  source 1..20: mol_type = other DNA
tcgcaagtgtacgcactcac

SEQ ID NO: 283713 - DNA, 20 bp, synthetic construct
  source 1..20: mol_type = other DNA
ctcgcaagtgtacgcactca

SEQ ID NO: 283714 - DNA, 20 bp, synthetic construct
  source 1..20: mol_type = other DNA
tctcgcaagtgtacgcactc

SEQ ID NO: 283715 - DNA, 20 bp, synthetic construct
  source 1..20: mol_type = other DNA
gtctcgcaagtgtacgcact

SEQ ID NO: 283716 - DNA, 20 bp, synthetic construct
  source 1..20: mol_type = other DNA
tgtctcgcaagtgtacgcac

SEQ ID NO: 283717 - DNA, 20 bp, synthetic construct
  source 1..20: mol_type = other DNA
gtgtctcgcaagtgtacgca

SEQ ID NO: 283718 - DNA, 20 bp, synthetic construct
  source 1..20: mol_type = other DNA
agtgtctcgcaagtgtacgc

SEQ ID NO: 283719 - DNA, 20 bp, synthetic construct
  source 1..20: mol_type = other DNA
cagtgtctcgcaagtgtacg

SEQ ID NO: 283720 - DNA, 20 bp, synthetic construct
  source 1..20: mol_type = other DNA
gcagtgtctcgcaagtgtac

SEQ ID NO: 283721 - DNA, 20 bp, synthetic construct
  source 1..20: mol_type = other DNA
tgcagtgtctcgcaagtgta

SEQ ID NO: 283722 - DNA, 20 bp, synthetic construct
  source 1..20: mol_type = other DNA
atgcagtgtctcgcaagtgt

SEQ ID NO: 283723 - DNA, 20 bp, synthetic construct
  source 1..20: mol_type = other DNA
tatgcagtgtctcgcaagtg

SEQ ID NO: 283724 - DNA, 20 bp, synthetic construct
  source 1..20: mol_type = other DNA
ctatgcagtgtctcgcaagt

SEQ ID NO: 283725 - DNA, 20 bp, synthetic construct
  source 1..20: mol_type = other DNA
tctatgcagtgtctcgcaag

SEQ ID NO: 283726 - DNA, 20 bp, synthetic construct
  source 1..20: mol_type = other DNA
ttctatgcagtgtctcgcaa

SEQ ID NO: 283727 - DNA, 20 bp, synthetic construct
  source 1..20: mol_type = other DNA
attctatgcagtgtctcgca

SEQ ID NO: 283728 - DNA, 20 bp, synthetic construct
  source 1..20: mol_type = other DNA
tattctatgcagtgtctcgc

SEQ ID NO: 283729 - DNA, 20 bp, synthetic construct
  source 1..20: mol_type = other DNA
ttattctatgcagtgtctcg

SEQ ID NO: 283730 - DNA, 20 bp, synthetic construct
  source 1..20: mol_type = other DNA
tttattctatgcagtgtctc

SEQ ID NO: 283731 - DNA, 20 bp, synthetic construct
  source 1..20: mol_type = other DNA
atttattctatgcagtgtct

SEQ ID NO: 283732 - DNA, 20 bp, synthetic construct
  source 1..20: mol_type = other DNA
gatttattctatgcagtgtc

SEQ ID NO: 283733 - DNA, 20 bp, synthetic construct
  source 1..20: mol_type = other DNA
ggatttattctatgcagtgt

SEQ ID NO: 283734 - DNA, 20 bp, synthetic construct
  source 1..20: mol_type = other DNA
aggatttattctatgcagtg

SEQ ID NO: 283735 - DNA, 20 bp, synthetic construct
  source 1..20: mol_type = other DNA
aaggatttattctatgcagt

SEQ ID NO: 283736 - DNA, 20 bp, synthetic construct
  source 1..20: mol_type = other DNA
gaaggatttattctatgcag

SEQ ID NO: 283737 - DNA, 20 bp, synthetic construct
  source 1..20: mol_type = other DNA
agaaggatttattctatgca

SEQ ID NO: 283738 - DNA, 20 bp, synthetic construct
  source 1..20: mol_type = other DNA
aagaaggatttattctatgc

SEQ ID NO: 283739 - DNA, 20 bp, synthetic construct
  source 1..20: mol_type = other DNA
caagaaggatttattctatg

SEQ ID NO: 283740 - DNA, 20 bp, synthetic construct
  source 1..20: mol_type = other DNA
ccaagaaggatttattctat

SEQ ID NO: 283741 - DNA, 20 bp, synthetic construct
  source 1..20: mol_type = other DNA
cccaagaaggatttattcta

SEQ ID NO: 283742 - DNA, 20 bp, synthetic construct
  source 1..20: mol_type = other DNA
gcccaagaaggatttattct

SEQ ID NO: 283743 - DNA, 20 bp, synthetic construct
  source 1..20: mol_type = other DNA
agcccaagaaggatttattc

SEQ ID NO: 283744 - DNA, 20 bp, synthetic construct
  source 1..20: mol_type = other DNA
gagcccaagaaggatttatt

SEQ ID NO: 283745 - DNA, 20 bp, synthetic construct
  source 1..20: mol_type = other DNA
agagcccaagaaggatttat

SEQ ID NO: 283746 - DNA, 20 bp, synthetic construct
  source 1..20: mol_type = other DNA
gagagcccaagaaggattta

SEQ ID NO: 283747 - DNA, 20 bp, synthetic construct
  source 1..20: mol_type = other DNA
tgagagcccaagaaggattt

SEQ ID NO: 283748 - DNA, 20 bp, synthetic construct
  source 1..20: mol_type = other DNA
ctgagagcccaagaaggatt

SEQ ID NO: 283749 - DNA, 20 bp, synthetic construct
  source 1..20: mol_type = other DNA
cctgagagcccaagaaggat

SEQ ID NO: 283750 - DNA, 20 bp, synthetic construct
  source 1..20: mol_type = other DNA
tcctgagagcccaagaagga

SEQ ID NO: 283751 - DNA, 20 bp, synthetic construct
  source 1..20: mol_type = other DNA
atcctgagagcccaagaagg

SEQ ID NO: 283752 - DNA, 20 bp, synthetic construct
  source 1..20: mol_type = other DNA
gatcctgagagcccaagaag

SEQ ID NO: 283753 - DNA, 20 bp, synthetic construct
  source 1..20: mol_type = other DNA
agatcctgagagcccaagaa

SEQ ID NO: 283754 - DNA, 20 bp, synthetic construct
  source 1..20: mol_type = other DNA
cagatcctgagagcccaaga

SEQ ID NO: 283755 - DNA, 20 bp, synthetic construct
  source 1..20: mol_type = other DNA
ccagatcctgagagcccaag

SEQ ID NO: 283756 - DNA, 20 bp, synthetic construct
  source 1..20: mol_type = other DNA
gccagatcctgagagcccaa

SEQ ID NO: 283757 - DNA, 20 bp, synthetic construct
  source 1..20: mol_type = other DNA
agccagatcctgagagccca

SEQ ID NO: 283758 - DNA, 20 bp, synthetic construct
  source 1..20: mol_type = other DNA
cagccagatcctgagagccc

SEQ ID NO: 283759 - DNA, 20 bp, synthetic construct
  source 1..20: mol_type = other DNA
gcagccagatcctgagagcc

SEQ ID NO: 283760 - DNA, 20 bp, synthetic construct
  source 1..20: mol_type = other DNA
cgcagccagatcctgagagc

SEQ ID NO: 283761 - DNA, 20 bp, synthetic construct
  source 1..20: mol_type = other DNA
tcgcagccagatcctgagag

SEQ ID NO: 283762 - DNA, 20 bp, synthetic construct
  source 1..20: mol_type = other DNA
gtcgcagccagatcctgaga

SEQ ID NO: 283763 - DNA, 20 bp, synthetic construct
  source 1..20: mol_type = other DNA
ggtcgcagccagatcctgag

SEQ ID NO: 283764 - DNA, 20 bp, synthetic construct
  source 1..20: mol_type = other DNA
aggtcgcagccagatcctga

SEQ ID NO: 283765 - DNA, 20 bp, synthetic construct
  source 1..20: mol_type = other DNA
gaggtcgcagccagatcctg

SEQ ID NO: 283766 - DNA, 20 bp, synthetic construct
  source 1..20: mol_type = other DNA
agaggtcgcagccagatcct

SEQ ID NO: 283767 - DNA, 20 bp, synthetic construct
  source 1..20: mol_type = other DNA
cagaggtcgcagccagatcc

SEQ ID NO: 283768 - DNA, 20 bp, synthetic construct
  source 1..20: mol_type = other DNA
ccagaggtcgcagccagatc

SEQ ID NO: 283769 - DNA, 20 bp, synthetic construct
  source 1..20: mol_type = other DNA
cccagaggtcgcagccagat

SEQ ID NO: 283770 - DNA, 20 bp, synthetic construct
  source 1..20: mol_type = other DNA
acccagaggtcgcagccaga

SEQ ID NO: 283771 - DNA, 20 bp, synthetic construct
  source 1..20: mol_type = other DNA
cacccagaggtcgcagccag

SEQ ID NO: 283772 - DNA, 20 bp, synthetic construct
  source 1..20: mol_type = other DNA
tcacccagaggtcgcagcca

SEQ ID NO: 283773 - DNA, 20 bp, synthetic construct
  source 1..20: mol_type = other DNA
ttcacccagaggtcgcagcc

SEQ ID NO: 283774 - DNA, 20 bp, synthetic construct
  source 1..20: mol_type = other DNA
attcacccagaggtcgcagc

SEQ ID NO: 283775 - DNA, 20 bp, synthetic construct
  source 1..20: mol_type = other DNA
cattcacccagaggtcgcag

SEQ ID NO: 283776 - DNA, 20 bp, synthetic construct
  source 1..20: mol_type = other DNA
acattcacccagaggtcgca

SEQ ID NO: 283777 - DNA, 20 bp, synthetic construct
  source 1..20: mol_type = other DNA
tacattcacccagaggtcgc

SEQ ID NO: 283778 - DNA, 20 bp, synthetic construct
  source 1..20: mol_type = other DNA
ctacattcacccagaggtcg

SEQ ID NO: 283779 - DNA, 20 bp, synthetic construct
  source 1..20: mol_type = other DNA
gctacattcacccagaggtc

SEQ ID NO: 283780 - DNA, 20 bp, synthetic construct
  source 1..20: mol_type = other DNA
ggctacattcacccagaggt

SEQ ID NO: 283781 - DNA, 20 bp, synthetic construct
  source 1..20: mol_type = other DNA
gggctacattcacccagagg

SEQ ID NO: 283782 - DNA, 20 bp, synthetic construct
  source 1..20: mol_type = other DNA
cgggctacattcacccagag

SEQ ID NO: 283783 - DNA, 20 bp, synthetic construct
  source 1..20: mol_type = other DNA
ccgggctacattcacccaga

SEQ ID NO: 283784 - DNA, 20 bp, synthetic construct
  source 1..20: mol_type = other DNA
gccgggctacattcacccag

SEQ ID NO: 283785 - DNA, 20 bp, synthetic construct
  source 1..20: mol_type = other DNA
agccgggctacattcaccca

SEQ ID NO: 283786 - DNA, 20 bp, synthetic construct
  source 1..20: mol_type = other DNA
gagccgggctacattcaccc

SEQ ID NO: 283787 - DNA, 20 bp, synthetic construct
  source 1..20: mol_type = other DNA
ggagccgggctacattcacc

SEQ ID NO: 283788 - DNA, 20 bp, synthetic construct
  source 1..20: mol_type = other DNA
gggagccgggctacattcac

SEQ ID NO: 283789 - DNA, 20 bp, synthetic construct
  source 1..20: mol_type = other DNA
ggggagccgggctacattca

SEQ ID NO: 283790 - DNA, 20 bp, synthetic construct
  source 1..20: mol_type = other DNA
tggggagccgggctacattc

SEQ ID NO: 283791 - DNA, 20 bp, synthetic construct
  source 1..20: mol_type = other DNA
gtggggagccgggctacatt

SEQ ID NO: 283792 - DNA, 20 bp, synthetic construct
  source 1..20: mol_type = other DNA
tgtggggagccgggctacat

SEQ ID NO: 283793 - DNA, 20 bp, synthetic construct
  source 1..20: mol_type = other DNA
atgtggggagccgggctaca

SEQ ID NO: 283794 - DNA, 20 bp, synthetic construct
  source 1..20: mol_type = other DNA
aatgtggggagccgggctac

SEQ ID NO: 283795 - DNA, 20 bp, synthetic construct
  source 1..20: mol_type = other DNA
gaatgtggggagccgggcta

SEQ ID NO: 283796 - DNA, 20 bp, synthetic construct
  source 1..20: mol_type = other DNA
ggaatgtggggagccgggct

SEQ ID NO: 283797 - DNA, 20 bp, synthetic construct
  source 1..20: mol_type = other DNA
gggaatgtggggagccgggc

SEQ ID NO: 283798 - DNA, 20 bp, synthetic construct
  source 1..20: mol_type = other DNA
ggggaatgtggggagccggg

SEQ ID NO: 283799 - DNA, 20 bp, synthetic construct
  source 1..20: mol_type = other DNA
gggggaatgtggggagccgg

SEQ ID NO: 283800 - DNA, 20 bp, synthetic construct
  source 1..20: mol_type = other DNA
tgggggaatgtggggagccg

SEQ ID NO: 283801 - DNA, 20 bp, synthetic construct
  source 1..20: mol_type = other DNA
gtgggggaatgtggggagcc

SEQ ID NO: 283802 - DNA, 20 bp, synthetic construct
  source 1..20: mol_type = other DNA
tgtgggggaatgtggggagc

SEQ ID NO: 283803 - DNA, 20 bp, synthetic construct
  source 1..20: mol_type = other DNA
gtgtgggggaatgtggggag

SEQ ID NO: 283804 - DNA, 20 bp, synthetic construct
  source 1..20: mol_type = other DNA
cgtgtgggggaatgtgggga

SEQ ID NO: 283805 - DNA, 20 bp, synthetic construct
  source 1..20: mol_type = other DNA
ccgtgtgggggaatgtgggg

SEQ ID NO: 283806 - DNA, 20 bp, synthetic construct
  source 1..20: mol_type = other DNA
accgtgtgggggaatgtggg

SEQ ID NO: 283807 - DNA, 20 bp, synthetic construct
  source 1..20: mol_type = other DNA
gaccgtgtgggggaatgtgg

SEQ ID NO: 283808 - DNA, 20 bp, synthetic construct
  source 1..20: mol_type = other DNA
ggaccgtgtgggggaatgtg

SEQ ID NO: 283809 - DNA, 20 bp, synthetic construct
  source 1..20: mol_type = other DNA
tggaccgtgtgggggaatgt

SEQ ID NO: 283810 - DNA, 20 bp, synthetic construct
  source 1..20: mol_type = other DNA
gtggaccgtgtgggggaatg

SEQ ID NO: 283811 - DNA, 20 bp, synthetic construct
  source 1..20: mol_type = other DNA
agtggaccgtgtgggggaat

SEQ ID NO: 283812 - DNA, 20 bp, synthetic construct
  source 1..20: mol_type = other DNA
cagtggaccgtgtgggggaa

SEQ ID NO: 283813 - DNA, 20 bp, synthetic construct
  source 1..20: mol_type = other DNA
acagtggaccgtgtggggga

SEQ ID NO: 283814 - DNA, 20 bp, synthetic construct
  source 1..20: mol_type = other DNA
aacagtggaccgtgtggggg

SEQ ID NO: 283815 - DNA, 20 bp, synthetic construct
  source 1..20: mol_type = other DNA
gaacagtggaccgtgtgggg

SEQ ID NO: 283816 - DNA, 20 bp, synthetic construct
  source 1..20: mol_type = other DNA
ggaacagtggaccgtgtggg

SEQ ID NO: 283817 - DNA, 20 bp, synthetic construct
  source 1..20: mol_type = other DNA
gggaacagtggaccgtgtgg

SEQ ID NO: 283818 - DNA, 20 bp, synthetic construct
  source 1..20: mol_type = other DNA
tgggaacagtggaccgtgtg

SEQ ID NO: 283819 - DNA, 20 bp, synthetic construct
  source 1..20: mol_type = other DNA
ctgggaacagtggaccgtgt

SEQ ID NO: 283820 - DNA, 20 bp, synthetic construct
  source 1..20: mol_type = other DNA
tctgggaacagtggaccgtg

SEQ ID NO: 283821 - DNA, 20 bp, synthetic construct
  source 1..20: mol_type = other DNA
ttctgggaacagtggaccgt

SEQ ID NO: 283822 - DNA, 20 bp, synthetic construct
  source 1..20: mol_type = other DNA
cttctgggaacagtggaccg

SEQ ID NO: 283823 - DNA, 20 bp, synthetic construct
  source 1..20: mol_type = other DNA
gcttctgggaacagtggacc

SEQ ID NO: 283824 - DNA, 20 bp, synthetic construct
  source 1..20: mol_type = other DNA
ggcttctgggaacagtggac

SEQ ID NO: 283825 - DNA, 20 bp, synthetic construct
  source 1..20: mol_type = other DNA
gggcttctgggaacagtgga

SEQ ID NO: 283826 - DNA, 20 bp, synthetic construct
  source 1..20: mol_type = other DNA
ggggcttctgggaacagtgg

SEQ ID NO: 283827 - DNA, 20 bp, synthetic construct
  source 1..20: mol_type = other DNA
aggggcttctgggaacagtg

SEQ ID NO: 283828 - DNA, 20 bp, synthetic construct
  source 1..20: mol_type = other DNA
aaggggcttctgggaacagt

SEQ ID NO: 283829 - DNA, 20 bp, synthetic construct
  source 1..20: mol_type = other DNA
gaaggggcttctgggaacag

SEQ ID NO: 283830 - DNA, 20 bp, synthetic construct
  source 1..20: mol_type = other DNA
ggaaggggcttctgggaaca

SEQ ID NO: 283831 - DNA, 20 bp, synthetic construct
  source 1..20: mol_type = other DNA
aggaaggggcttctgggaac

SEQ ID NO: 283832 - DNA, 20 bp, synthetic construct
  source 1..20: mol_type = other DNA
gaggaaggggcttctgggaa

SEQ ID NO: 283833 - DNA, 20 bp, synthetic construct
  source 1..20: mol_type = other DNA
tgaggaaggggcttctggga

SEQ ID NO: 283834 - DNA, 20 bp, synthetic construct
  source 1..20: mol_type = other DNA
atgaggaaggggcttctggg

SEQ ID NO: 283835 - DNA, 20 bp, synthetic construct
  source 1..20: mol_type = other DNA
tatgaggaaggggcttctgg

SEQ ID NO: 283836 - DNA, 20 bp, synthetic construct
  source 1..20: mol_type = other DNA
atatgaggaaggggcttctg

SEQ ID NO: 283837 - DNA, 20 bp, synthetic construct
  source 1..20: mol_type = other DNA
aatatgaggaaggggcttct

SEQ ID NO: 283838 - DNA, 20 bp, synthetic construct
  source 1..20: mol_type = other DNA
gaatatgaggaaggggcttc

SEQ ID NO: 283839 - DNA, 20 bp, synthetic construct
  source 1..20: mol_type = other DNA
agaatatgaggaaggggctt

SEQ ID NO: 283840 - DNA, 20 bp, synthetic construct
  source 1..20: mol_type = other DNA
tagaatatgaggaaggggct

SEQ ID NO: 283841 - DNA, 20 bp, synthetic construct
  source 1..20: mol_type = other DNA
ctagaatatgaggaaggggc

SEQ ID NO: 283842 - DNA, 20 bp, synthetic construct
  source 1..20: mol_type = other DNA
cctagaatatgaggaagggg

SEQ ID NO: 283843 - DNA, 20 bp, synthetic construct
  source 1..20: mol_type = other DNA
tcctagaatatgaggaaggg

SEQ ID NO: 283844 - DNA, 20 bp, synthetic construct
  source 1..20: mol_type = other DNA
ctcctagaatatgaggaagg

SEQ ID NO: 283845 - DNA, 20 bp, synthetic construct
  source 1..20: mol_type = other DNA
cctcctagaatatgaggaag

SEQ ID NO: 283846 - DNA, 20 bp, synthetic construct
  source 1..20: mol_type = other DNA
ccctcctagaatatgaggaa

SEQ ID NO: 283847 - DNA, 20 bp, synthetic construct
  source 1..20: mol_type = other DNA
cccctcctagaatatgagga

SEQ ID NO: 283848 - DNA, 20 bp, synthetic construct
  source 1..20: mol_type = other DNA
ccccctcctagaatatgagg

SEQ ID NO: 283849 - DNA, 20 bp, synthetic construct
  source 1..20: mol_type = other DNA
accccctcctagaatatgag

SEQ ID NO: 283850 - DNA, 20 bp, synthetic construct
  source 1..20: mol_type = other DNA
caccccctcctagaatatga

SEQ ID NO: 283851 - DNA, 20 bp, synthetic construct
  source 1..20: mol_type = other DNA
acaccccctcctagaatatg

SEQ ID NO: 283852 - DNA, 20 bp, synthetic construct
  source 1..20: mol_type = other DNA
gacaccccctcctagaatat

SEQ ID NO: 283853 - DNA, 20 bp, synthetic construct
  source 1..20: mol_type = other DNA
ggacaccccctcctagaata

SEQ ID NO: 283854 - DNA, 20 bp, synthetic construct
  source 1..20: mol_type = other DNA
gggacaccccctcctagaat

SEQ ID NO: 283855 - DNA, 20 bp, synthetic construct
  source 1..20: mol_type = other DNA
tgggacaccccctcctagaa

SEQ ID NO: 283856 - DNA, 20 bp, synthetic construct
  source 1..20: mol_type = other DNA
ctgggacaccccctcctaga

SEQ ID NO: 283857 - DNA, 20 bp, synthetic construct
  source 1..20: mol_type = other DNA
gctgggacaccccctcctag

SEQ ID NO: 283858 - DNA, 20 bp, synthetic construct
  source 1..20: mol_type = other DNA
tgctgggacaccccctccta

SEQ ID NO: 283859 - DNA, 20 bp, synthetic construct
  source 1..20: mol_type = other DNA
atgctgggacaccccctcct

SEQ ID NO: 283860 - DNA, 20 bp, synthetic construct
  source 1..20: mol_type = other DNA
aatgctgggacaccccctcc

SEQ ID NO: 283861 - DNA, 20 bp, synthetic construct
  source 1..20: mol_type = other DNA
aaatgctgggacaccccctc

SEQ ID NO: 283862 - DNA, 20 bp, synthetic construct
  source 1..20: mol_type = other DNA
gaaatgctgggacaccccct

SEQ ID NO: 283863 - DNA, 20 bp, synthetic construct
  source 1..20: mol_type = other DNA
agaaatgctgggacaccccc

SEQ ID NO: 283864 - DNA, 20 bp, synthetic construct
  source 1..20: mol_type = other DNA
cagaaatgctgggacacccc

SEQ ID NO: 283865 - DNA, 20 bp, synthetic construct
  source 1..20: mol_type = other DNA
ccagaaatgctgggacaccc

SEQ ID NO: 283866 - DNA, 20 bp, synthetic construct
  source 1..20: mol_type = other DNA
cccagaaatgctgggacacc

SEQ ID NO: 283867 - DNA, 20 bp, synthetic construct
  source 1..20: mol_type = other DNA
acccagaaatgctgggacac

SEQ ID NO: 283868 - DNA, 20 bp, synthetic construct
  source 1..20: mol_type = other DNA
gacccagaaatgctgggaca

SEQ ID NO: 283869 - DNA, 20 bp, synthetic construct
  source 1..20: mol_type = other DNA
ggacccagaaatgctgggac

SEQ ID NO: 283870 - DNA, 20 bp, synthetic construct
  source 1..20: mol_type = other DNA
gggacccagaaatgctggga

SEQ ID NO: 283871 - DNA, 20 bp, synthetic construct
  source 1..20: mol_type = other DNA
ggggacccagaaatgctggg

SEQ ID NO: 283872 - DNA, 20 bp, synthetic construct
  source 1..20: mol_type = other DNA
gggggacccagaaatgctgg

SEQ ID NO: 283873 - DNA, 20 bp, synthetic construct
  source 1..20: mol_type = other DNA
tgggggacccagaaatgctg

SEQ ID NO: 283874 - DNA, 20 bp, synthetic construct
  source 1..20: mol_type = other DNA
ctgggggacccagaaatgct

SEQ ID NO: 283875 - DNA, 20 bp, synthetic construct
  source 1..20: mol_type = other DNA
gctgggggacccagaaatgc

SEQ ID NO: 283876 - DNA, 20 bp, synthetic construct
  source 1..20: mol_type = other DNA
ggctgggggacccagaaatg

SEQ ID NO: 283877 - DNA, 20 bp, synthetic construct
  source 1..20: mol_type = other DNA
aggctgggggacccagaaat

SEQ ID NO: 283878 - DNA, 20 bp, synthetic construct
  source 1..20: mol_type = other DNA
caggctgggggacccagaaa

SEQ ID NO: 283879 - DNA, 20 bp, synthetic construct
  source 1..20: mol_type = other DNA
gcaggctgggggacccagaa

SEQ ID NO: 283880 - DNA, 20 bp, synthetic construct
  source 1..20: mol_type = other DNA
cgcaggctgggggacccaga

SEQ ID NO: 283881 - DNA, 20 bp, synthetic construct
  source 1..20: mol_type = other DNA
gcgcaggctgggggacccag

SEQ ID NO: 283882 - DNA, 20 bp, synthetic construct
  source 1..20: mol_type = other DNA
tgcgcaggctgggggaccca

SEQ ID NO: 283883 - DNA, 20 bp, synthetic construct
  source 1..20: mol_type = other DNA
ctgcgcaggctgggggaccc

SEQ ID NO: 283884 - DNA, 20 bp, synthetic construct
  source 1..20: mol_type = other DNA
cctgcgcaggctgggggacc

SEQ ID NO: 283885 - DNA, 20 bp, synthetic construct
  source 1..20: mol_type = other DNA
gcctgcgcaggctgggggac

SEQ ID NO: 283886 - DNA, 20 bp, synthetic construct
  source 1..20: mol_type = other DNA
agcctgcgcaggctggggga

SEQ ID NO: 283887 - DNA, 20 bp, synthetic construct
  source 1..20: mol_type = other DNA
cagcctgcgcaggctggggg

SEQ ID NO: 283888 - DNA, 20 bp, synthetic construct
  source 1..20: mol_type = other DNA
acagcctgcgcaggctgggg

SEQ ID NO: 283889 - DNA, 20 bp, synthetic construct
  source 1..20: mol_type = other DNA
cacagcctgcgcaggctggg

SEQ ID NO: 283890 - DNA, 20 bp, synthetic construct
  source 1..20: mol_type = other DNA
acacagcctgcgcaggctgg

SEQ ID NO: 283891 - DNA, 20 bp, synthetic construct
  source 1..20: mol_type = other DNA
cacacagcctgcgcaggctg

SEQ ID NO: 283892 - DNA, 20 bp, synthetic construct
  source 1..20: mol_type = other DNA
ccacacagcctgcgcaggct

SEQ ID NO: 283893 - DNA, 20 bp, synthetic construct
  source 1..20: mol_type = other DNA
tccacacagcctgcgcaggc

SEQ ID NO: 283894 - DNA, 20 bp, synthetic construct
  source 1..20: mol_type = other DNA
gtccacacagcctgcgcagg

SEQ ID NO: 283895 - DNA, 20 bp, synthetic construct
  source 1..20: mol_type = other DNA
tgtccacacagcctgcgcag

SEQ ID NO: 283896 - DNA, 20 bp, synthetic construct
  source 1..20: mol_type = other DNA
ctgtccacacagcctgcgca

SEQ ID NO: 283897 - DNA, 20 bp, synthetic construct
  source 1..20: mol_type = other DNA
tctgtccacacagcctgcgc

SEQ ID NO: 283898 - DNA, 20 bp, synthetic construct
  source 1..20: mol_type = other DNA
ttctgtccacacagcctgcg

SEQ ID NO: 283899 - DNA, 20 bp, synthetic construct
  source 1..20: mol_type = other DNA
attctgtccacacagcctgc

SEQ ID NO: 283900 - DNA, 20 bp, synthetic construct
  source 1..20: mol_type = other DNA
tattctgtccacacagcctg

SEQ ID NO: 283901 - DNA, 20 bp, synthetic construct
  source 1..20: mol_type = other DNA
ctattctgtccacacagcct

SEQ ID NO: 283902 - DNA, 20 bp, synthetic construct
  source 1..20: mol_type = other DNA
cctattctgtccacacagcc

SEQ ID NO: 283903 - DNA, 20 bp, synthetic construct
  source 1..20: mol_type = other DNA
ccctattctgtccacacagc

SEQ ID NO: 283904 - DNA, 20 bp, synthetic construct
  source 1..20: mol_type = other DNA
gccctattctgtccacacag

SEQ ID NO: 283905 - DNA, 20 bp, synthetic construct
  source 1..20: mol_type = other DNA
tgccctattctgtccacaca

SEQ ID NO: 283906 - DNA, 20 bp, synthetic construct
  source 1..20: mol_type = other DNA
ctgccctattctgtccacac

SEQ ID NO: 283907 - DNA, 20 bp, synthetic construct
  source 1..20: mol_type = other DNA
tctgccctattctgtccaca

SEQ ID NO: 283908 - DNA, 20 bp, synthetic construct
  source 1..20: mol_type = other DNA
atctgccctattctgtccac

SEQ ID NO: 283909 - DNA, 20 bp, synthetic construct
  source 1..20: mol_type = other DNA
catctgccctattctgtcca

SEQ ID NO: 283910 - DNA, 20 bp, synthetic construct
  source 1..20: mol_type = other DNA
tcatctgccctattctgtcc

SEQ ID NO: 283911 - DNA, 20 bp, synthetic construct
  source 1..20: mol_type = other DNA
gtcatctgccctattctgtc

SEQ ID NO: 283912 - DNA, 20 bp, synthetic construct
  source 1..20: mol_type = other DNA
cgtcatctgccctattctgt

SEQ ID NO: 283913 - DNA, 20 bp, synthetic construct
  source 1..20: mol_type = other DNA
ccgtcatctgccctattctg

SEQ ID NO: 283914 - DNA, 20 bp, synthetic construct
  source 1..20: mol_type = other DNA
tccgtcatctgccctattct

SEQ ID NO: 283915 - DNA, 20 bp, synthetic construct
  source 1..20: mol_type = other DNA
gtccgtcatctgccctattc

SEQ ID NO: 283916 - DNA, 20 bp, synthetic construct
  source 1..20: mol_type = other DNA
ggtccgtcatctgccctatt

SEQ ID NO: 283917 - DNA, 20 bp, synthetic construct
  source 1..20: mol_type = other DNA
gggtccgtcatctgccctat

SEQ ID NO: 283918 - DNA, 20 bp, synthetic construct
  source 1..20: mol_type = other DNA
agggtccgtcatctgcccta

SEQ ID NO: 283919 - DNA, 20 bp, synthetic construct
  source 1..20: mol_type = other DNA
gagggtccgtcatctgccct

SEQ ID NO: 283920 - DNA, 20 bp, synthetic construct
  source 1..20: mol_type = other DNA
agagggtccgtcatctgccc

SEQ ID NO: 283921 - DNA, 20 bp, synthetic construct
  source 1..20: mol_type = other DNA
gagagggtccgtcatctgcc

SEQ ID NO: 283922 - DNA, 20 bp, synthetic construct
  source 1..20: mol_type = other DNA
agagagggtccgtcatctgc

SEQ ID NO: 283923 - DNA, 20 bp, synthetic construct
  source 1..20: mol_type = other DNA
gagagagggtccgtcatctg

SEQ ID NO: 283924 - DNA, 20 bp, synthetic construct
  source 1..20: mol_type = other DNA
ggagagagggtccgtcatct

SEQ ID NO: 283925 - DNA, 20 bp, synthetic construct
  source 1..20: mol_type = other DNA
cggagagagggtccgtcatc

SEQ ID NO: 283926 - DNA, 20 bp, synthetic construct
  source 1..20: mol_type = other DNA
ccggagagagggtccgtcat

SEQ ID NO: 283927 - DNA, 20 bp, synthetic construct
  source 1..20: mol_type = other DNA
tccggagagagggtccgtca

SEQ ID NO: 283928 - DNA, 20 bp, synthetic construct
  source 1..20: mol_type = other DNA
gtccggagagagggtccgtc

SEQ ID NO: 283929 - DNA, 20 bp, synthetic construct
  source 1..20: mol_type = other DNA
ggtccggagagagggtccgt

SEQ ID NO: 283930 - DNA, 20 bp, synthetic construct
  source 1..20: mol_type = other DNA
gggtccggagagagggtccg

SEQ ID NO: 283931 - DNA, 20 bp, synthetic construct
  source 1..20: mol_type = other DNA
agggtccggagagagggtcc

SEQ ID NO: 283932 - DNA, 20 bp, synthetic construct
  source 1..20: mol_type = other DNA
cagggtccggagagagggtc

SEQ ID NO: 283933 - DNA, 20 bp, synthetic construct
  source 1..20: mol_type = other DNA
gcagggtccggagagagggt

SEQ ID NO: 283934 - DNA, 20 bp, synthetic construct
  source 1..20: mol_type = other DNA
ggcagggtccggagagaggg

SEQ ID NO: 283935 - DNA, 20 bp, synthetic construct
  source 1..20: mol_type = other DNA
aggcagggtccggagagagg

SEQ ID NO: 283936 - DNA, 20 bp, synthetic construct
  source 1..20: mol_type = other DNA
caggcagggtccggagagag

SEQ ID NO: 283937 - DNA, 20 bp, synthetic construct
  source 1..20: mol_type = other DNA
ccaggcagggtccggagaga

SEQ ID NO: 283938 - DNA, 20 bp, synthetic construct
  source 1..20: mol_type = other DNA
cccaggcagggtccggagag

SEQ ID NO: 283939 - DNA, 20 bp, synthetic construct
  source 1..20: mol_type = other DNA
tcccaggcagggtccggaga

SEQ ID NO: 283940 - DNA, 20 bp, synthetic construct
  source 1..20: mol_type = other DNA
ttcccaggcagggtccggag

SEQ ID NO: 283941 - DNA, 20 bp, synthetic construct
  source 1..20: mol_type = other DNA
cttcccaggcagggtccgga

SEQ ID NO: 283942 - DNA, 20 bp, synthetic construct
  source 1..20: mol_type = other DNA
gcttcccaggcagggtccgg

SEQ ID NO: 283943 - DNA, 20 bp, synthetic construct
  source 1..20: mol_type = other DNA
agcttcccaggcagggtccg

SEQ ID NO: 283944 - DNA, 20 bp, synthetic construct
  source 1..20: mol_type = other DNA
cagcttcccaggcagggtcc

SEQ ID NO: 283945 - DNA, 20 bp, synthetic construct
  source 1..20: mol_type = other DNA
tcagcttcccaggcagggtc

SEQ ID NO: 283946 - DNA, 20 bp, synthetic construct
  source 1..20: mol_type = other DNA
ctcagcttcccaggcagggt

SEQ ID NO: 283947 - DNA, 20 bp, synthetic construct
  source 1..20: mol_type = other DNA
tctcagcttcccaggcaggg

SEQ ID NO: 283948 - DNA, 20 bp, synthetic construct
  source 1..20: mol_type = other DNA
ttctcagcttcccaggcagg

SEQ ID NO: 283949 - DNA, 20 bp, synthetic construct
  source 1..20: mol_type = other DNA
attctcagcttcccaggcag

SEQ ID NO: 283950 - DNA, 20 bp, synthetic construct
  source 1..20: mol_type = other DNA
tattctcagcttcccaggca

SEQ ID NO: 283951 - DNA, 20 bp, synthetic construct
  source 1..20: mol_type = other DNA
gtattctcagcttcccaggc

SEQ ID NO: 283952 - DNA, 20 bp, synthetic construct
  source 1..20: mol_type = other DNA
ggtattctcagcttcccagg

SEQ ID NO: 283953 - DNA, 20 bp, synthetic construct
  source 1..20: mol_type = other DNA
gggtattctcagcttcccag

SEQ ID NO: 283954 - DNA, 20 bp, synthetic construct
  source 1..20: mol_type = other DNA
tgggtattctcagcttccca

SEQ ID NO: 283955 - DNA, 20 bp, synthetic construct
  source 1..20: mol_type = other DNA
atgggtattctcagcttccc

SEQ ID NO: 283956 - DNA, 20 bp, synthetic construct
  source 1..20: mol_type = other DNA
gatgggtattctcagcttcc

SEQ ID NO: 283957 - DNA, 20 bp, synthetic construct
  source 1..20: mol_type = other DNA
tgatgggtattctcagcttc

SEQ ID NO: 283958 - DNA, 20 bp, synthetic construct
  source 1..20: mol_type = other DNA
ttgatgggtattctcagctt

SEQ ID NO: 283959 - DNA, 20 bp, synthetic construct
  source 1..20: mol_type = other DNA
tttgatgggtattctcagct

SEQ ID NO: 283960 - DNA, 20 bp, synthetic construct
  source 1..20: mol_type = other DNA
ctttgatgggtattctcagc

SEQ ID NO: 283961 - DNA, 20 bp, synthetic construct
  source 1..20: mol_type = other DNA
actttgatgggtattctcag

SEQ ID NO: 283962 - DNA, 20 bp, synthetic construct
  source 1..20: mol_type = other DNA
gactttgatgggtattctca

SEQ ID NO: 283963 - DNA, 20 bp, synthetic construct
  source 1..20: mol_type = other DNA
agactttgatgggtattctc

SEQ ID NO: 283964 - DNA, 20 bp, synthetic construct
  source 1..20: mol_type = other DNA
gagactttgatgggtattct

SEQ ID NO: 283965 - DNA, 20 bp, synthetic construct
  source 1..20: mol_type = other DNA
ggagactttgatgggtattc

SEQ ID NO: 283966 - DNA, 20 bp, synthetic construct
  source 1..20: mol_type = other DNA
aggagactttgatgggtatt

SEQ ID NO: 283967 - DNA, 20 bp, synthetic construct
  source 1..20: mol_type = other DNA
aaggagactttgatgggtat

SEQ ID NO: 283968 - DNA, 20 bp, synthetic construct
  source 1..20: mol_type = other DNA
gaaggagactttgatgggta

SEQ ID NO: 283969 - DNA, 20 bp, synthetic construct
  source 1..20: mol_type = other DNA
ggaaggagactttgatgggt

SEQ ID NO: 283970 - DNA, 20 bp, synthetic construct
  source 1..20: mol_type = other DNA
tggaaggagactttgatggg

SEQ ID NO: 283971 - DNA, 20 bp, synthetic construct
  source 1..20: mol_type = other DNA
gtggaaggagactttgatgg

SEQ ID NO: 283972 - DNA, 20 bp, synthetic construct
  source 1..20: mol_type = other DNA
agtggaaggagactttgatg

SEQ ID NO: 283973 - DNA, 20 bp, synthetic construct
  source 1..20: mol_type = other DNA
gagtggaaggagactttgat

SEQ ID NO: 283974 - DNA, 20 bp, synthetic construct
  source 1..20: mol_type = other DNA
tgagtggaaggagactttga

SEQ ID NO: 283975 - DNA, 20 bp, synthetic construct
  source 1..20: mol_type = other DNA
atgagtggaaggagactttg

SEQ ID NO: 283976 - DNA, 20 bp, synthetic construct
  source 1..20: mol_type = other DNA
catgagtggaaggagacttt

SEQ ID NO: 283977 - DNA, 20 bp, synthetic construct
  source 1..20: mol_type = other DNA
gcatgagtggaaggagactt

SEQ ID NO: 283978 - DNA, 20 bp, synthetic construct
  source 1..20: mol_type = other DNA
ggcatgagtggaaggagact

SEQ ID NO: 283979 - DNA, 20 bp, synthetic construct
  source 1..20: mol_type = other DNA
gggcatgagtggaaggagac

SEQ ID NO: 283980 - DNA, 20 bp, synthetic construct
  source 1..20: mol_type = other DNA
tgggcatgagtggaaggaga

SEQ ID NO: 283981 - DNA, 20 bp, synthetic construct
  source 1..20: mol_type = other DNA
ctgggcatgagtggaaggag

SEQ ID NO: 283982 - DNA, 20 bp, synthetic construct
  source 1..20: mol_type = other DNA
gctgggcatgagtggaagga

SEQ ID NO: 283983 - DNA, 20 bp, synthetic construct
  source 1..20: mol_type = other DNA
ggctgggcatgagtggaagg

SEQ ID NO: 283984 - DNA, 20 bp, synthetic construct
  source 1..20: mol_type = other DNA
gggctgggcatgagtggaag

SEQ ID NO: 283985 - DNA, 20 bp, synthetic construct
  source 1..20: mol_type = other DNA
agggctgggcatgagtggaa

SEQ ID NO: 283986 - DNA, 20 bp, synthetic construct
  source 1..20: mol_type = other DNA
cagggctgggcatgagtgga

SEQ ID NO: 283987 - DNA, 20 bp, synthetic construct
  source 1..20: mol_type = other DNA
acagggctgggcatgagtgg

SEQ ID NO: 283988 - DNA, 20 bp, synthetic construct
  source 1..20: mol_type = other DNA
gacagggctgggcatgagtg

SEQ ID NO: 283989 - DNA, 20 bp, synthetic construct
  source 1..20: mol_type = other DNA
ggacagggctgggcatgagt

SEQ ID NO: 283990 - DNA, 20 bp, synthetic construct
  source 1..20: mol_type = other DNA
gggacagggctgggcatgag

SEQ ID NO: 283991 - DNA, 20 bp, synthetic construct
  source 1..20: mol_type = other DNA
ggggacagggctgggcatga

SEQ ID NO: 283992 - DNA, 20 bp, synthetic construct
  source 1..20: mol_type = other DNA
tggggacagggctgggcatg

SEQ ID NO: 283993 - DNA, 20 bp, synthetic construct
  source 1..20: mol_type = other DNA
ctggggacagggctgggcat

SEQ ID NO: 283994 - DNA, 20 bp, synthetic construct
  source 1..20: mol_type = other DNA
cctggggacagggctgggca

SEQ ID NO: 283995 - DNA, 20 bp, synthetic construct
  source 1..20: mol_type = other DNA
tcctggggacagggctgggc

SEQ ID NO: 283996 - DNA, 20 bp, synthetic construct
  source 1..20: mol_type = other DNA
ctcctggggacagggctggg

SEQ ID NO: 283997 - DNA, 20 bp, synthetic construct
  source 1..20: mol_type = other DNA
gctcctggggacagggctgg

SEQ ID NO: 283998 - DNA, 20 bp, synthetic construct
  source 1..20: mol_type = other DNA
ggctcctggggacagggctg

SEQ ID NO: 283999 - DNA, 20 bp, synthetic construct
  source 1..20: mol_type = other DNA
gggctcctggggacagggct

SEQ ID NO: 284000 - DNA, 20 bp, synthetic construct
  source 1..20: mol_type = other DNA
ggggctcctggggacagggc

SEQ ID NO: 284001 - DNA, 20 bp, synthetic construct
  source 1..20: mol_type = other DNA
tggggctcctggggacaggg

SEQ ID NO: 284002 - DNA, 20 bp, synthetic construct
  source 1..20: mol_type = other DNA
atggggctcctggggacagg

SEQ ID NO: 284003 - DNA, 20 bp, synthetic construct
  source 1..20: mol_type = other DNA
tatggggctcctggggacag

SEQ ID NO: 284004 - DNA, 20 bp, synthetic construct
  source 1..20: mol_type = other DNA
ctatggggctcctggggaca

SEQ ID NO: 284005 - DNA, 20 bp, synthetic construct
  source 1..20: mol_type = other DNA
gctatggggctcctggggac

SEQ ID NO: 284006 - DNA, 20 bp, synthetic construct
  source 1..20: mol_type = other DNA
ggctatggggctcctgggga

SEQ ID NO: 284007 - DNA, 20 bp, synthetic construct
  source 1..20: mol_type = other DNA
gggctatggggctcctgggg

SEQ ID NO: 284008 - DNA, 20 bp, synthetic construct
  source 1..20: mol_type = other DNA
tgggctatggggctcctggg

SEQ ID NO: 284009 - DNA, 20 bp, synthetic construct
  source 1..20: mol_type = other DNA
atgggctatggggctcctgg

SEQ ID NO: 284010 - DNA, 20 bp, synthetic construct
  source 1..20: mol_type = other DNA
aatgggctatggggctcctg

SEQ ID NO: 284011 - DNA, 20 bp, synthetic construct
  source 1..20: mol_type = other DNA
caatgggctatggggctcct

SEQ ID NO: 284012 - DNA, 20 bp, synthetic construct
  source 1..20: mol_type = other DNA
ccaatgggctatggggctcc

SEQ ID NO: 284013 - DNA, 20 bp, synthetic construct
  source 1..20: mol_type = other DNA
tccaatgggctatggggctc

SEQ ID NO: 284014 - DNA, 20 bp, synthetic construct
  source 1..20: mol_type = other DNA
ttccaatgggctatggggct

SEQ ID NO: 284015 - DNA, 20 bp, synthetic construct
  source 1..20: mol_type = other DNA
cttccaatgggctatggggc

SEQ ID NO: 284016 - DNA, 20 bp, synthetic construct
  source 1..20: mol_type = other DNA
acttccaatgggctatgggg

SEQ ID NO: 284017 - DNA, 20 bp, synthetic construct
  source 1..20: mol_type = other DNA
aacttccaatgggctatggg

SEQ ID NO: 284018 - DNA, 20 bp, synthetic construct
  source 1..20: mol_type = other DNA
caacttccaatgggctatgg

SEQ ID NO: 284019 - DNA, 20 bp, synthetic construct
  source 1..20: mol_type = other DNA
ccaacttccaatgggctatg

SEQ ID NO: 284020 - DNA, 20 bp, synthetic construct
  source 1..20: mol_type = other DNA
cccaacttccaatgggctat

SEQ ID NO: 284021 - DNA, 20 bp, synthetic construct
  source 1..20: mol_type = other DNA
gcccaacttccaatgggcta

SEQ ID NO: 284022 - DNA, 20 bp, synthetic construct
  source 1..20: mol_type = other DNA
agcccaacttccaatgggct

SEQ ID NO: 284023 - DNA, 20 bp, synthetic construct
  source 1..20: mol_type = other DNA
cagcccaacttccaatgggc

SEQ ID NO: 284024 - DNA, 20 bp, synthetic construct
  source 1..20: mol_type = other DNA
tcagcccaacttccaatggg

SEQ ID NO: 284025 - DNA, 20 bp, synthetic construct
  source 1..20: mol_type = other DNA
ttcagcccaacttccaatgg

SEQ ID NO: 284026 - DNA, 20 bp, synthetic construct
  source 1..20: mol_type = other DNA
cttcagcccaacttccaatg

SEQ ID NO: 284027 - DNA, 20 bp, synthetic construct
  source 1..20: mol_type = other DNA
ccttcagcccaacttccaat

SEQ ID NO: 284028 - DNA, 20 bp, synthetic construct
  source 1..20: mol_type = other DNA
accttcagcccaacttccaa

SEQ ID NO: 284029 - DNA, 20 bp, synthetic construct
  source 1..20: mol_type = other DNA
caccttcagcccaacttcca

SEQ ID NO: 284030 - DNA, 20 bp, synthetic construct
  source 1..20: mol_type = other DNA
ccaccttcagcccaacttcc

SEQ ID NO: 284031 - DNA, 20 bp, synthetic construct
  source 1..20: mol_type = other DNA
accaccttcagcccaacttc

SEQ ID NO: 284032 - DNA, 20 bp, synthetic construct
  source 1..20: mol_type = other DNA
caccaccttcagcccaactt

SEQ ID NO: 284033 - DNA, 20 bp, synthetic construct
  source 1..20: mol_type = other DNA
ccaccaccttcagcccaact

SEQ ID NO: 284034 - DNA, 20 bp, synthetic construct
  source 1..20: mol_type = other DNA
gccaccaccttcagcccaac

SEQ ID NO: 284035 - DNA, 20 bp, synthetic construct
  source 1..20: mol_type = other DNA
tgccaccaccttcagcccaa

SEQ ID NO: 284036 - DNA, 20 bp, synthetic construct
  source 1..20: mol_type = other DNA
gtgccaccaccttcagccca

SEQ ID NO: 284037 - DNA, 20 bp, synthetic construct
  source 1..20: mol_type = other DNA
ggtgccaccaccttcagccc

SEQ ID NO: 284038 - DNA, 20 bp, synthetic construct
  source 1..20: mol_type = other DNA
aggtgccaccaccttcagcc

SEQ ID NO: 284039 - DNA, 20 bp, synthetic construct
  source 1..20: mol_type = other DNA
caggtgccaccaccttcagc

SEQ ID NO: 284040 - DNA, 20 bp, synthetic construct
  source 1..20: mol_type = other DNA
tcaggtgccaccaccttcag

SEQ ID NO: 284041 - DNA, 20 bp, synthetic construct
  source 1..20: mol_type = other DNA
ctcaggtgccaccaccttca

SEQ ID NO: 284042 - DNA, 20 bp, synthetic construct
  source 1..20: mol_type = other DNA
tctcaggtgccaccaccttc

SEQ ID NO: 284043 - DNA, 20 bp, synthetic construct
  source 1..20: mol_type = other DNA
gtctcaggtgccaccacctt

SEQ ID NO: 284044 - DNA, 20 bp, synthetic construct
  source 1..20: mol_type = other DNA
agtctcaggtgccaccacct

SEQ ID NO: 284045 - DNA, 20 bp, synthetic construct
  source 1..20: mol_type = other DNA
cagtctcaggtgccaccacc

SEQ ID NO: 284046 - DNA, 20 bp, synthetic construct
  source 1..20: mol_type = other DNA
ccagtctcaggtgccaccac

SEQ ID NO: 284047 - DNA, 20 bp, synthetic construct
  source 1..20: mol_type = other DNA
cccagtctcaggtgccacca

SEQ ID NO: 284048 - DNA, 20 bp, synthetic construct
  source 1..20: mol_type = other DNA
gcccagtctcaggtgccacc

SEQ ID NO: 284049 - DNA, 20 bp, synthetic construct
  source 1..20: mol_type = other DNA
agcccagtctcaggtgccac

SEQ ID NO: 284050 - DNA, 20 bp, synthetic construct
  source 1..20: mol_type = other DNA
cagcccagtctcaggtgcca

SEQ ID NO: 284051 - DNA, 20 bp, synthetic construct
  source 1..20: mol_type = other DNA
gcagcccagtctcaggtgcc

SEQ ID NO: 284052 - DNA, 20 bp, synthetic construct
  source 1..20: mol_type = other DNA
ggcagcccagtctcaggtgc

SEQ ID NO: 284053 - DNA, 20 bp, synthetic construct
  source 1..20: mol_type = other DNA
cggcagcccagtctcaggtg

SEQ ID NO: 284054 - DNA, 20 bp, synthetic construct
  source 1..20: mol_type = other DNA
gcggcagcccagtctcaggt

SEQ ID NO: 284055 - DNA, 20 bp, synthetic construct
  source 1..20: mol_type = other DNA
ggcggcagcccagtctcagg

SEQ ID NO: 284056 - DNA, 20 bp, synthetic construct
  source 1..20: mol_type = other DNA
aggcggcagcccagtctcag

SEQ ID NO: 284057 - DNA, 20 bp, synthetic construct
  source 1..20: mol_type = other DNA
gaggcggcagcccagtctca

SEQ ID NO: 284058 - DNA, 20 bp, synthetic construct
  source 1..20: mol_type = other DNA
ggaggcggcagcccagtctc

SEQ ID NO: 284059 - DNA, 20 bp, synthetic construct
  source 1..20: mol_type = other DNA
aggaggcggcagcccagtct

SEQ ID NO: 284060 - DNA, 20 bp, synthetic construct
  source 1..20: mol_type = other DNA
gaggaggcggcagcccagtc

SEQ ID NO: 284061 - DNA, 20 bp, synthetic construct
  source 1..20: mol_type = other DNA
ggaggaggcggcagcccagt

SEQ ID NO: 284062 - DNA, 20 bp, synthetic construct
  source 1..20: mol_type = other DNA
gggaggaggcggcagcccag

SEQ ID NO: 284063 - DNA, 20 bp, synthetic construct
  source 1..20: mol_type = other DNA
ggggaggaggcggcagccca

SEQ ID NO: 284064 - DNA, 20 bp, synthetic construct
  source 1..20: mol_type = other DNA
gggggaggaggcggcagccc

SEQ ID NO: 284065 - DNA, 20 bp, synthetic construct
  source 1..20: mol_type = other DNA
cgggggaggaggcggcagcc

SEQ ID NO: 284066 - DNA, 20 bp, synthetic construct
  source 1..20: mol_type = other DNA
tcgggggaggaggcggcagc

SEQ ID NO: 284067 - DNA, 20 bp, synthetic construct
  source 1..20: mol_type = other DNA
gtcgggggaggaggcggcag

SEQ ID NO: 284068 - DNA, 20 bp, synthetic construct
  source 1..20: mol_type = other DNA
tgtcgggggaggaggcggca

SEQ ID NO: 284069 - DNA, 20 bp, synthetic construct
  source 1..20: mol_type = other DNA
gtgtcgggggaggaggcggc

SEQ ID NO: 284070 - DNA, 20 bp, synthetic construct
  source 1..20: mol_type = other DNA
ggtgtcgggggaggaggcgg

SEQ ID NO: 284071 - DNA, 20 bp, synthetic construct
  source 1..20: mol_type = other DNA
aggtgtcgggggaggaggcg

SEQ ID NO: 284072 - DNA, 20 bp, synthetic construct
  source 1..20: mol_type = other DNA
caggtgtcgggggaggaggc

SEQ ID NO: 284073 - DNA, 20 bp, synthetic construct
  source 1..20: mol_type = other DNA
ccaggtgtcgggggaggagg

SEQ ID NO: 284074 - DNA, 20 bp, synthetic construct
  source 1..20: mol_type = other DNA
cccaggtgtcgggggaggag

SEQ ID NO: 284075 - DNA, 20 bp, synthetic construct
  source 1..20: mol_type = other DNA
gcccaggtgtcgggggagga

SEQ ID NO: 284076 - DNA, 20 bp, synthetic construct
  source 1..20: mol_type = other DNA
tgcccaggtgtcgggggagg

SEQ ID NO: 284077 - DNA, 20 bp, synthetic construct
  source 1..20: mol_type = other DNA
ctgcccaggtgtcgggggag

SEQ ID NO: 284078 - DNA, 20 bp, synthetic construct
  source 1..20: mol_type = other DNA
cctgcccaggtgtcggggga

SEQ ID NO: 284079 - DNA, 20 bp, synthetic construct
  source 1..20: mol_type = other DNA
acctgcccaggtgtcggggg

SEQ ID NO: 284080 - DNA, 20 bp, synthetic construct
  source 1..20: mol_type = other DNA
aacctgcccaggtgtcgggg

SEQ ID NO: 284081 - DNA, 20 bp, synthetic construct
  source 1..20: mol_type = other DNA
caacctgcccaggtgtcggg

SEQ ID NO: 284082 - DNA, 20 bp, synthetic construct
  source 1..20: mol_type = other DNA
tcaacctgcccaggtgtcgg

SEQ ID NO: 284083 - DNA, 20 bp, synthetic construct
  source 1..20: mol_type = other DNA
gtcaacctgcccaggtgtcg

SEQ ID NO: 284084 - DNA, 20 bp, synthetic construct
  source 1..20: mol_type = other DNA
cgtcaacctgcccaggtgtc

SEQ ID NO: 284085 - DNA, 20 bp, synthetic construct
  source 1..20: mol_type = other DNA
acgtcaacctgcccaggtgt

SEQ ID NO: 284086 - DNA, 20 bp, synthetic construct
  source 1..20: mol_type = other DNA
aacgtcaacctgcccaggtg

SEQ ID NO: 284087 - DNA, 20 bp, synthetic construct
  source 1..20: mol_type = other DNA
caacgtcaacctgcccaggt

SEQ ID NO: 284088 - DNA, 20 bp, synthetic construct
  source 1..20: mol_type = other DNA
tcaacgtcaacctgcccagg

SEQ ID NO: 284089 - DNA, 20 bp, synthetic construct
  source 1..20: mol_type = other DNA
ctcaacgtcaacctgcccag

SEQ ID NO: 284090 - DNA, 20 bp, synthetic construct
  source 1..20: mol_type = other DNA
actcaacgtcaacctgccca

SEQ ID NO: 284091 - DNA, 20 bp, synthetic construct
  source 1..20: mol_type = other DNA
cactcaacgtcaacctgccc

SEQ ID NO: 284092 - DNA, 20 bp, synthetic construct
  source 1..20: mol_type = other DNA
ccactcaacgtcaacctgcc

SEQ ID NO: 284093 - DNA, 20 bp, synthetic construct
  source 1..20: mol_type = other DNA
gccactcaacgtcaacctgc

SEQ ID NO: 284094 - DNA, 20 bp, synthetic construct
  source 1..20: mol_type = other DNA
agccactcaacgtcaacctg

SEQ ID NO: 284095 - DNA, 20 bp, synthetic construct
  source 1..20: mol_type = other DNA
gagccactcaacgtcaacct

SEQ ID NO: 284096 - DNA, 20 bp, synthetic construct
  source 1..20: mol_type = other DNA
ggagccactcaacgtcaacc

SEQ ID NO: 284097 - DNA, 20 bp, synthetic construct
  source 1..20: mol_type = other DNA
tggagccactcaacgtcaac

SEQ ID NO: 284098 - DNA, 20 bp, synthetic construct
  source 1..20: mol_type = other DNA
gtggagccactcaacgtcaa

SEQ ID NO: 284099 - DNA, 20 bp, synthetic construct
  source 1..20: mol_type = other DNA
agtggagccactcaacgtca

SEQ ID NO: 284100 - DNA, 20 bp, synthetic construct
  source 1..20: mol_type = other DNA
cagtggagccactcaacgtc

SEQ ID NO: 284101 - DNA, 20 bp, synthetic construct
  source 1..20: mol_type = other DNA
acagtggagccactcaacgt

SEQ ID NO: 284102 - DNA, 20 bp, synthetic construct
  source 1..20: mol_type = other DNA
cacagtggagccactcaacg

SEQ ID NO: 284103 - DNA, 20 bp, synthetic construct
  source 1..20: mol_type = other DNA
ccacagtggagccactcaac

SEQ ID NO: 284104 - DNA, 20 bp, synthetic construct
  source 1..20: mol_type = other DNA
tccacagtggagccactcaa

SEQ ID NO: 284105 - DNA, 20 bp, synthetic construct
  source 1..20: mol_type = other DNA
gtccacagtggagccactca

SEQ ID NO: 284106 - DNA, 20 bp, synthetic construct
  source 1..20: mol_type = other DNA
tgtccacagtggagccactc

SEQ ID NO: 284107 - DNA, 20 bp, synthetic construct
  source 1..20: mol_type = other DNA
ctgtccacagtggagccact

SEQ ID NO: 284108 - DNA, 20 bp, synthetic construct
  source 1..20: mol_type = other DNA
cctgtccacagtggagccac

SEQ ID NO: 284109 - DNA, 20 bp, synthetic construct
  source 1..20: mol_type = other DNA
acctgtccacagtggagcca

SEQ ID NO: 284110 - DNA, 20 bp, synthetic construct
  source 1..20: mol_type = other DNA
cacctgtccacagtggagcc

SEQ ID NO: 284111 - DNA, 20 bp, synthetic construct
  source 1..20: mol_type = other DNA
tcacctgtccacagtggagc

SEQ ID NO: 284112 - DNA, 20 bp, synthetic construct
  source 1..20: mol_type = other DNA
gtcacctgtccacagtggag

SEQ ID NO: 284113 - DNA, 20 bp, synthetic construct
  source 1..20: mol_type = other DNA
ggtcacctgtccacagtgga

SEQ ID NO: 284114 - DNA, 20 bp, synthetic construct
  source 1..20: mol_type = other DNA
gggtcacctgtccacagtgg

SEQ ID NO: 284115 - DNA, 20 bp, synthetic construct
  source 1..20: mol_type = other DNA
cgggtcacctgtccacagtg

SEQ ID NO: 284116 - DNA, 20 bp, synthetic construct
  source 1..20: mol_type = other DNA
acgggtcacctgtccacagt

SEQ ID NO: 284117 - DNA, 20 bp, synthetic construct
  source 1..20: mol_type = other DNA
aacgggtcacctgtccacag

SEQ ID NO: 284118 - DNA, 20 bp, synthetic construct
  source 1..20: mol_type = other DNA
aaacgggtcacctgtccaca

SEQ ID NO: 284119 - DNA, 20 bp, synthetic construct
  source 1..20: mol_type = other DNA
caaacgggtcacctgtccac

SEQ ID NO: 284120 - DNA, 20 bp, synthetic construct
  source 1..20: mol_type = other DNA
acaaacgggtcacctgtcca

SEQ ID NO: 284121 - DNA, 20 bp, synthetic construct
  source 1..20: mol_type = other DNA
aacaaacgggtcacctgtcc

SEQ ID NO: 284122 - DNA, 20 bp, synthetic construct
  source 1..20: mol_type = other DNA
gaacaaacgggtcacctgtc

SEQ ID NO: 284123 - DNA, 20 bp, synthetic construct
  source 1..20: mol_type = other DNA
agaacaaacgggtcacctgt

SEQ ID NO: 284124 - DNA, 20 bp, synthetic construct
  source 1..20: mol_type = other DNA
cagaacaaacgggtcacctg

SEQ ID NO: 284125 - DNA, 20 bp, synthetic construct
  source 1..20: mol_type = other DNA
tcagaacaaacgggtcacct

SEQ ID NO: 284126 - DNA, 20 bp, synthetic construct
  source 1..20: mol_type = other DNA
atcagaacaaacgggtcacc

SEQ ID NO: 284127 - DNA, 20 bp, synthetic construct
  source 1..20: mol_type = other DNA
catcagaacaaacgggtcac

SEQ ID NO: 284128 - DNA, 20 bp, synthetic construct
  source 1..20: mol_type = other DNA
tcatcagaacaaacgggtca

SEQ ID NO: 284129 - DNA, 20 bp, synthetic construct
  source 1..20: mol_type = other DNA
ctcatcagaacaaacgggtc

SEQ ID NO: 284130 - DNA, 20 bp, synthetic construct
  source 1..20: mol_type = other DNA
gctcatcagaacaaacgggt

SEQ ID NO: 284131 - DNA, 20 bp, synthetic construct
  source 1..20: mol_type = other DNA
cgctcatcagaacaaacggg

SEQ ID NO: 284132 - DNA, 20 bp, synthetic construct
  source 1..20: mol_type = other DNA
ccgctcatcagaacaaacgg

SEQ ID NO: 284133 - DNA, 20 bp, synthetic construct
  source 1..20: mol_type = other DNA
tccgctcatcagaacaaacg

SEQ ID NO: 284134 - DNA, 20 bp, synthetic construct
  source 1..20: mol_type = other DNA
gtccgctcatcagaacaaac

SEQ ID NO: 284135 - DNA, 20 bp, synthetic construct
  source 1..20: mol_type = other DNA
tgtccgctcatcagaacaaa

SEQ ID NO: 284136 - DNA, 20 bp, synthetic construct
  source 1..20: mol_type = other DNA
gtgtccgctcatcagaacaa

SEQ ID NO: 284137 - DNA, 20 bp, synthetic construct
  source 1..20: mol_type = other DNA
ggtgtccgctcatcagaaca

SEQ ID NO: 284138 - DNA, 20 bp, synthetic construct
  source 1..20: mol_type = other DNA
tggtgtccgctcatcagaac

SEQ ID NO: 284139 - DNA, 20 bp, synthetic construct
  source 1..20: mol_type = other DNA
ttggtgtccgctcatcagaa

SEQ ID NO: 284140 - DNA, 20 bp, synthetic construct
  source 1..20: mol_type = other DNA
cttggtgtccgctcatcaga

SEQ ID NO: 284141 - DNA, 20 bp, synthetic construct
  source 1..20: mol_type = other DNA
ccttggtgtccgctcatcag

SEQ ID NO: 284142 - DNA, 20 bp, synthetic construct
  source 1..20: mol_type = other DNA
accttggtgtccgctcatca

SEQ ID NO: 284143 - DNA, 20 bp, synthetic construct
  source 1..20: mol_type = other DNA
gaccttggtgtccgctcatc

SEQ ID NO: 284144 - DNA, 20 bp, synthetic construct
  source 1..20: mol_type = other DNA
agaccttggtgtccgctcat

SEQ ID NO: 284145 - DNA, 20 bp, synthetic construct
  source 1..20: mol_type = other DNA
aagaccttggtgtccgctca

SEQ ID NO: 284146 - DNA, 20 bp, synthetic construct
  source 1..20: mol_type = other DNA
taagaccttggtgtccgctc

SEQ ID NO: 284147 - DNA, 20 bp, synthetic construct
  source 1..20: mol_type = other DNA
gtaagaccttggtgtccgct

SEQ ID NO: 284148 - DNA, 20 bp, synthetic construct
  source 1..20: mol_type = other DNA
agtaagaccttggtgtccgc

SEQ ID NO: 284149 - DNA, 20 bp, synthetic construct
  source 1..20: mol_type = other DNA
cagtaagaccttggtgtccg

SEQ ID NO: 284150 - DNA, 20 bp, synthetic construct
  source 1..20: mol_type = other DNA
acagtaagaccttggtgtcc

SEQ ID NO: 284151 - DNA, 20 bp, synthetic construct
  source 1..20: mol_type = other DNA
gacagtaagaccttggtgtc

SEQ ID NO: 284152 - DNA, 20 bp, synthetic construct
  source 1..20: mol_type = other DNA
ggacagtaagaccttggtgt

SEQ ID NO: 284153 - DNA, 20 bp, synthetic construct
  source 1..20: mol_type = other DNA
aggacagtaagaccttggtg

SEQ ID NO: 284154 - DNA, 20 bp, synthetic construct
  source 1..20: mol_type = other DNA
caggacagtaagaccttggt

SEQ ID NO: 284155 - DNA, 20 bp, synthetic construct
  source 1..20: mol_type = other DNA
gcaggacagtaagaccttgg

SEQ ID NO: 284156 - DNA, 20 bp, synthetic construct
  source 1..20: mol_type = other DNA
agcaggacagtaagaccttg

SEQ ID NO: 284157 - DNA, 20 bp, synthetic construct
  source 1..20: mol_type = other DNA
gagcaggacagtaagacctt

SEQ ID NO: 284158 - DNA, 20 bp, synthetic construct
  source 1..20: mol_type = other DNA
tgagcaggacagtaagacct

SEQ ID NO: 284159 - DNA, 20 bp, synthetic construct
  source 1..20: mol_type = other DNA
ctgagcaggacagtaagacc

SEQ ID NO: 284160 - DNA, 20 bp, synthetic construct
  source 1..20: mol_type = other DNA
gctgagcaggacagtaagac

SEQ ID NO: 284161 - DNA, 20 bp, synthetic construct
  source 1..20: mol_type = other DNA
agctgagcaggacagtaaga

SEQ ID NO: 284162 - DNA, 20 bp, synthetic construct
  source 1..20: mol_type = other DNA
cagctgagcaggacagtaag

SEQ ID NO: 284163 - DNA, 20 bp, synthetic construct
  source 1..20: mol_type = other DNA
gcagctgagcaggacagtaa

SEQ ID NO: 284164 - DNA, 20 bp, synthetic construct
  source 1..20: mol_type = other DNA
agcagctgagcaggacagta

SEQ ID NO: 284165 - DNA, 20 bp, synthetic construct
  source 1..20: mol_type = other DNA
cagcagctgagcaggacagt

SEQ ID NO: 284166 - DNA, 20 bp, synthetic construct
  source 1..20: mol_type = other DNA
gcagcagctgagcaggacag

SEQ ID NO: 284167 - DNA, 20 bp, synthetic construct
  source 1..20: mol_type = other DNA
agcagcagctgagcaggaca

SEQ ID NO: 284168 - DNA, 20 bp, synthetic construct
  source 1..20: mol_type = other DNA
gagcagcagctgagcaggac

SEQ ID NO: 284169 - DNA, 20 bp, synthetic construct
  source 1..20: mol_type = other DNA
ggagcagcagctgagcagga

SEQ ID NO: 284170 - DNA, 20 bp, synthetic construct
  source 1..20: mol_type = other DNA
aggagcagcagctgagcagg

SEQ ID NO: 284171 - DNA, 20 bp, synthetic construct
  source 1..20: mol_type = other DNA
taggagcagcagctgagcag

SEQ ID NO: 284172 - DNA, 20 bp, synthetic construct
  source 1..20: mol_type = other DNA
gtaggagcagcagctgagca

SEQ ID NO: 284173 - DNA, 20 bp, synthetic construct
  source 1..20: mol_type = other DNA
tgtaggagcagcagctgagc

SEQ ID NO: 284174 - DNA, 20 bp, synthetic construct
  source 1..20: mol_type = other DNA
gtgtaggagcagcagctgag

SEQ ID NO: 284175 - DNA, 20 bp, synthetic construct
  source 1..20: mol_type = other DNA
cgtgtaggagcagcagctga

SEQ ID NO: 284176 - DNA, 20 bp, synthetic construct
  source 1..20: mol_type = other DNA
acgtgtaggagcagcagctg

SEQ ID NO: 284177 - DNA, 20 bp, synthetic construct
  source 1..20: mol_type = other DNA
aacgtgtaggagcagcagct

SEQ ID NO: 284178 - DNA, 20 bp, synthetic construct
  source 1..20: mol_type = other DNA
gaacgtgtaggagcagcagc

SEQ ID NO: 284179 - DNA, 20 bp, synthetic construct
  source 1..20: mol_type = other DNA
tgaacgtgtaggagcagcag

SEQ ID NO: 284180 - DNA, 20 bp, synthetic construct
  source 1..20: mol_type = other DNA
ttgaacgtgtaggagcagca

SEQ ID NO: 284181 - DNA, 20 bp, synthetic construct
  source 1..20: mol_type = other DNA
cttgaacgtgtaggagcagc

SEQ ID NO: 284182 - DNA, 20 bp, synthetic construct
  source 1..20: mol_type = other DNA
ccttgaacgtgtaggagcag

SEQ ID NO: 284183 - DNA, 20 bp, synthetic construct
  source 1..20: mol_type = other DNA
gccttgaacgtgtaggagca

SEQ ID NO: 284184 - DNA, 20 bp, synthetic construct
  source 1..20: mol_type = other DNA
tgccttgaacgtgtaggagc

SEQ ID NO: 284185 - DNA, 20 bp, synthetic construct
  source 1..20: mol_type = other DNA
ctgccttgaacgtgtaggag

SEQ ID NO: 284186 - DNA, 20 bp, synthetic construct
  source 1..20: mol_type = other DNA
cctgccttgaacgtgtagga

SEQ ID NO: 284187 - DNA, 20 bp, synthetic construct
  source 1..20: mol_type = other DNA
tcctgccttgaacgtgtagg

SEQ ID NO: 284188 - DNA, 20 bp, synthetic construct
  source 1..20: mol_type = other DNA
ctcctgccttgaacgtgtag

SEQ ID NO: 284189 - DNA, 20 bp, synthetic construct
  source 1..20: mol_type = other DNA
gctcctgccttgaacgtgta

SEQ ID NO: 284190 - DNA, 20 bp, synthetic construct
  source 1..20: mol_type = other DNA
ggctcctgccttgaacgtgt

SEQ ID NO: 284191 - DNA, 20 bp, synthetic construct
  source 1..20: mol_type = other DNA
cggctcctgccttgaacgtg

SEQ ID NO: 284192 - DNA, 20 bp, synthetic construct
  source 1..20: mol_type = other DNA
tcggctcctgccttgaacgt

SEQ ID NO: 284193 - DNA, 20 bp, synthetic construct
  source 1..20: mol_type = other DNA
atcggctcctgccttgaacg

SEQ ID NO: 284194 - DNA, 20 bp, synthetic construct
  source 1..20: mol_type = other DNA
aatcggctcctgccttgaac

SEQ ID NO: 284195 - DNA, 20 bp, synthetic construct
  source 1..20: mol_type = other DNA
gaatcggctcctgccttgaa

SEQ ID NO: 284196 - DNA, 20 bp, synthetic construct
  source 1..20: mol_type = other DNA
ggaatcggctcctgccttga

SEQ ID NO: 284197 - DNA, 20 bp, synthetic construct
  source 1..20: mol_type = other DNA
aggaatcggctcctgccttg

SEQ ID NO: 284198 - DNA, 20 bp, synthetic construct
  source 1..20: mol_type = other DNA
taggaatcggctcctgcctt

SEQ ID NO: 284199 - DNA, 20 bp, synthetic construct
  source 1..20: mol_type = other DNA
ttaggaatcggctcctgcct

SEQ ID NO: 284200 - DNA, 20 bp, synthetic construct
  source 1..20: mol_type = other DNA
cttaggaatcggctcctgcc

SEQ ID NO: 284201 - DNA, 20 bp, synthetic construct
  source 1..20: mol_type = other DNA
gcttaggaatcggctcctgc

SEQ ID NO: 284202 - DNA, 20 bp, synthetic construct
  source 1..20: mol_type = other DNA
ggcttaggaatcggctcctg

SEQ ID NO: 284203 - DNA, 20 bp, synthetic construct
  source 1..20: mol_type = other DNA
aggcttaggaatcggctcct

SEQ ID NO: 284204 - DNA, 20 bp, synthetic construct
  source 1..20: mol_type = other DNA
gaggcttaggaatcggctcc

SEQ ID NO: 284205 - DNA, 20 bp, synthetic construct
  source 1..20: mol_type = other DNA
ggaggcttaggaatcggctc

SEQ ID NO: 284206 - DNA, 20 bp, synthetic construct
  source 1..20: mol_type = other DNA
tggaggcttaggaatcggct

SEQ ID NO: 284207 - DNA, 20 bp, synthetic construct
  source 1..20: mol_type = other DNA
ctggaggcttaggaatcggc

SEQ ID NO: 284208 - DNA, 20 bp, synthetic construct
  source 1..20: mol_type = other DNA
gctggaggcttaggaatcgg

SEQ ID NO: 284209 - DNA, 20 bp, synthetic construct
  source 1..20: mol_type = other DNA
agctggaggcttaggaatcg

SEQ ID NO: 284210 - DNA, 20 bp, synthetic construct
  source 1..20: mol_type = other DNA
aagctggaggcttaggaatc

SEQ ID NO: 284211 - DNA, 20 bp, synthetic construct
  source 1..20: mol_type = other DNA
taagctggaggcttaggaat

SEQ ID NO: 284212 - DNA, 20 bp, synthetic construct
  source 1..20: mol_type = other DNA
ataagctggaggcttaggaa

SEQ ID NO: 284213 - DNA, 20 bp, synthetic construct
  source 1..20: mol_type = other DNA
cataagctggaggcttagga

SEQ ID NO: 284214 - DNA, 20 bp, synthetic construct
  source 1..20: mol_type = other DNA
gcataagctggaggcttagg

SEQ ID NO: 284215 - DNA, 20 bp, synthetic construct
  source 1..20: mol_type = other DNA
agcataagctggaggcttag

SEQ ID NO: 284216 - DNA, 20 bp, synthetic construct
  source 1..20: mol_type = other DNA
aagcataagctggaggctta

SEQ ID NO: 284217 - DNA, 20 bp, synthetic construct
  source 1..20: mol_type = other DNA
taagcataagctggaggctt

SEQ ID NO: 284218 - DNA, 20 bp, synthetic construct
  source 1..20: mol_type = other DNA
ctaagcataagctggaggct

SEQ ID NO: 284219 - DNA, 20 bp, synthetic construct
  source 1..20: mol_type = other DNA
gctaagcataagctggaggc

SEQ ID NO: 284220 - DNA, 20 bp, synthetic construct
  source 1..20: mol_type = other DNA
ggctaagcataagctggagg

SEQ ID NO: 284221 - DNA, 20 bp, synthetic construct
  source 1..20: mol_type = other DNA
aggctaagcataagctggag

SEQ ID NO: 284222 - DNA, 20 bp, synthetic construct
  source 1..20: mol_type = other DNA
caggctaagcataagctgga

SEQ ID NO: 284223 - DNA, 20 bp, synthetic construct
  source 1..20: mol_type = other DNA
gcaggctaagcataagctgg

SEQ ID NO: 284224 - DNA, 20 bp, synthetic construct
  source 1..20: mol_type = other DNA
cgcaggctaagcataagctg

SEQ ID NO: 284225 - DNA, 20 bp, synthetic construct
  source 1..20: mol_type = other DNA
gcgcaggctaagcataagct

SEQ ID NO: 284226 - DNA, 20 bp, synthetic construct
  source 1..20: mol_type = other DNA
ggcgcaggctaagcataagc

SEQ ID NO: 284227 - DNA, 20 bp, synthetic construct
  source 1..20: mol_type = other DNA
tggcgcaggctaagcataag

SEQ ID NO: 284228 - DNA, 20 bp, synthetic construct
  source 1..20: mol_type = other DNA
gtggcgcaggctaagcataa

SEQ ID NO: 284229 - DNA, 20 bp, synthetic construct
  source 1..20: mol_type = other DNA
ggtggcgcaggctaagcata

SEQ ID NO: 284230 - DNA, 20 bp, synthetic construct
  source 1..20: mol_type = other DNA
gggtggcgcaggctaagcat

SEQ ID NO: 284231 - DNA, 20 bp, synthetic construct
  source 1..20: mol_type = other DNA
agggtggcgcaggctaagca

SEQ ID NO: 284232 - DNA, 20 bp, synthetic construct
  source 1..20: mol_type = other DNA
gagggtggcgcaggctaagc

SEQ ID NO: 284233 - DNA, 20 bp, synthetic construct
  source 1..20: mol_type = other DNA
agagggtggcgcaggctaag

SEQ ID NO: 284234 - DNA, 20 bp, synthetic construct
  source 1..20: mol_type = other DNA
cagagggtggcgcaggctaa

SEQ ID NO: 284235 - DNA, 20 bp, synthetic construct
  source 1..20: mol_type = other DNA
ccagagggtggcgcaggcta

SEQ ID NO: 284236 - DNA, 20 bp, synthetic construct
  source 1..20: mol_type = other DNA
gccagagggtggcgcaggct

SEQ ID NO: 284237 - DNA, 20 bp, synthetic construct
  source 1..20: mol_type = other DNA
tgccagagggtggcgcaggc

SEQ ID NO: 284238 - DNA, 20 bp, synthetic construct
  source 1..20: mol_type = other DNA
ctgccagagggtggcgcagg

SEQ ID NO: 284239 - DNA, 20 bp, synthetic construct
  source 1..20: mol_type = other DNA
tctgccagagggtggcgcag

SEQ ID NO: 284240 - DNA, 20 bp, synthetic construct
  source 1..20: mol_type = other DNA
ctctgccagagggtggcgca

SEQ ID NO: 284241 - DNA, 20 bp, synthetic construct
  source 1..20: mol_type = other DNA
tctctgccagagggtggcgc

SEQ ID NO: 284242 - DNA, 20 bp, synthetic construct
  source 1..20: mol_type = other DNA
gtctctgccagagggtggcg

SEQ ID NO: 284243 - DNA, 20 bp, synthetic construct
  source 1..20: mol_type = other DNA
agtctctgccagagggtggc

SEQ ID NO: 284244 - DNA, 20 bp, synthetic construct
  source 1..20: mol_type = other DNA
gagtctctgccagagggtgg

SEQ ID NO: 284245 - DNA, 20 bp, synthetic construct
  source 1..20: mol_type = other DNA
ggagtctctgccagagggtg

SEQ ID NO: 284246 - DNA, 20 bp, synthetic construct
  source 1..20: mol_type = other DNA
tggagtctctgccagagggt

SEQ ID NO: 284247 - DNA, 20 bp, synthetic construct
  source 1..20: mol_type = other DNA
ctggagtctctgccagaggg

SEQ ID NO: 284248 - DNA, 20 bp, synthetic construct
  source 1..20: mol_type = other DNA
tctggagtctctgccagagg

SEQ ID NO: 284249 - DNA, 20 bp, synthetic construct
  source 1..20: mol_type = other DNA
atctggagtctctgccagag

SEQ ID NO: 284250 - DNA, 20 bp, synthetic construct
  source 1..20: mol_type = other DNA
catctggagtctctgccaga

SEQ ID NO: 284251 - DNA, 20 bp, synthetic construct
  source 1..20: mol_type = other DNA
gcatctggagtctctgccag

SEQ ID NO: 284252 - DNA, 20 bp, synthetic construct
  source 1..20: mol_type = other DNA
tgcatctggagtctctgcca

SEQ ID NO: 284253 - DNA, 20 bp, synthetic construct
  source 1..20: mol_type = other DNA
ttgcatctggagtctctgcc

SEQ ID NO: 284254 - DNA, 20 bp, synthetic construct
  source 1..20: mol_type = other DNA
tttgcatctggagtctctgc

SEQ ID NO: 284255 - DNA, 20 bp, synthetic construct
  source 1..20: mol_type = other DNA
ctttgcatctggagtctctg

SEQ ID NO: 284256 - DNA, 20 bp, synthetic construct
  source 1..20: mol_type = other DNA
tctttgcatctggagtctct

SEQ ID NO: 284257 - DNA, 20 bp, synthetic construct
  source 1..20: mol_type = other DNA
ctctttgcatctggagtctc

SEQ ID NO: 284258 - DNA, 20 bp, synthetic construct
  source 1..20: mol_type = other DNA
gctctttgcatctggagtct

SEQ ID NO: 284259 - DNA, 20 bp, synthetic construct
  source 1..20: mol_type = other DNA
ggctctttgcatctggagtc

SEQ ID NO: 284260 - DNA, 20 bp, synthetic construct
  source 1..20: mol_type = other DNA
tggctctttgcatctggagt

SEQ ID NO: 284261 - DNA, 20 bp, synthetic construct
  source 1..20: mol_type = other DNA
ttggctctttgcatctggag

SEQ ID NO: 284262 - DNA, 20 bp, synthetic construct
  source 1..20: mol_type = other DNA
tttggctctttgcatctgga

SEQ ID NO: 284263 - DNA, 20 bp, synthetic construct
  source 1..20: mol_type = other DNA
gtttggctctttgcatctgg

SEQ ID NO: 284264 - DNA, 20 bp, synthetic construct
  source 1..20: mol_type = other DNA
ggtttggctctttgcatctg

SEQ ID NO: 284265 - DNA, 20 bp, synthetic construct
  source 1..20: mol_type = other DNA
tggtttggctctttgcatct

SEQ ID NO: 284266 - DNA, 20 bp, synthetic construct
  source 1..20: mol_type = other DNA
ttggtttggctctttgcatc

SEQ ID NO: 284267 - DNA, 20 bp, synthetic construct
  source 1..20: mol_type = other DNA
tttggtttggctctttgcat

SEQ ID NO: 284268 - DNA, 20 bp, synthetic construct
  source 1..20: mol_type = other DNA
ctttggtttggctctttgca

SEQ ID NO: 284269 - DNA, 20 bp, synthetic construct
  source 1..20: mol_type = other DNA
actttggtttggctctttgc

SEQ ID NO: 284270 - DNA, 20 bp, synthetic construct
  source 1..20: mol_type = other DNA
cactttggtttggctctttg

SEQ ID NO: 284271 - DNA, 20 bp, synthetic construct
  source 1..20: mol_type = other DNA
gcactttggtttggctcttt

SEQ ID NO: 284272 - DNA, 20 bp, synthetic construct
  source 1..20: mol_type = other DNA
cgcactttggtttggctctt

SEQ ID NO: 284273 - DNA, 20 bp, synthetic construct
  source 1..20: mol_type = other DNA
tcgcactttggtttggctct

SEQ ID NO: 284274 - DNA, 20 bp, synthetic construct
  source 1..20: mol_type = other DNA
gtcgcactttggtttggctc

SEQ ID NO: 284275 - DNA, 20 bp, synthetic construct
  source 1..20: mol_type = other DNA
tgtcgcactttggtttggct

SEQ ID NO: 284276 - DNA, 20 bp, synthetic construct
  source 1..20: mol_type = other DNA
ctgtcgcactttggtttggc

SEQ ID NO: 284277 - DNA, 20 bp, synthetic construct
  source 1..20: mol_type = other DNA
cctgtcgcactttggtttgg

SEQ ID NO: 284278 - DNA, 20 bp, synthetic construct
  source 1..20: mol_type = other DNA
acctgtcgcactttggtttg

SEQ ID NO: 284279 - DNA, 20 bp, synthetic construct
  source 1..20: mol_type = other DNA
gacctgtcgcactttggttt

SEQ ID NO: 284280 - DNA, 20 bp, synthetic construct
  source 1..20: mol_type = other DNA
ggacctgtcgcactttggtt

SEQ ID NO: 284281 - DNA, 20 bp, synthetic construct
  source 1..20: mol_type = other DNA
gggacctgtcgcactttggt

SEQ ID NO: 284282 - DNA, 20 bp, synthetic construct
  source 1..20: mol_type = other DNA
agggacctgtcgcactttgg

SEQ ID NO: 284283 - DNA, 20 bp, synthetic construct
  source 1..20: mol_type = other DNA
gagggacctgtcgcactttg

SEQ ID NO: 284284 - DNA, 20 bp, synthetic construct
  source 1..20: mol_type = other DNA
agagggacctgtcgcacttt

SEQ ID NO: 284285 - DNA, 20 bp, synthetic construct
  source 1..20: mol_type = other DNA
cagagggacctgtcgcactt

SEQ ID NO: 284286 - DNA, 20 bp, synthetic construct
  source 1..20: mol_type = other DNA
gcagagggacctgtcgcact

SEQ ID NO: 284287 - DNA, 20 bp, synthetic construct
  source 1..20: mol_type = other DNA
ggcagagggacctgtcgcac

SEQ ID NO: 284288 - DNA, 20 bp, synthetic construct
  source 1..20: mol_type = other DNA
gggcagagggacctgtcgca

SEQ ID NO: 284289 - DNA, 20 bp, synthetic construct
  source 1..20: mol_type = other DNA
tgggcagagggacctgtcgc

SEQ ID NO: 284290 - DNA, 20 bp, synthetic construct
  source 1..20: mol_type = other DNA
ctgggcagagggacctgtcg

SEQ ID NO: 284291 - DNA, 20 bp, synthetic construct
  source 1..20: mol_type = other DNA
gctgggcagagggacctgtc

SEQ ID NO: 284292 - DNA, 20 bp, synthetic construct
  source 1..20: mol_type = other DNA
cgctgggcagagggacctgt

SEQ ID NO: 284293 - DNA, 20 bp, synthetic construct
  source 1..20: mol_type = other DNA
acgctgggcagagggacctg

SEQ ID NO: 284294 - DNA, 20 bp, synthetic construct
  source 1..20: mol_type = other DNA
aacgctgggcagagggacct

SEQ ID NO: 284295 - DNA, 20 bp, synthetic construct
  source 1..20: mol_type = other DNA
caacgctgggcagagggacc

SEQ ID NO: 284296 - DNA, 20 bp, synthetic construct
  source 1..20: mol_type = other DNA
tcaacgctgggcagagggac

SEQ ID NO: 284297 - DNA, 20 bp, synthetic construct
  source 1..20: mol_type = other DNA
ctcaacgctgggcagaggga

SEQ ID NO: 284298 - DNA, 20 bp, synthetic construct
  source 1..20: mol_type = other DNA
cctcaacgctgggcagaggg

SEQ ID NO: 284299 - DNA, 20 bp, synthetic construct
  source 1..20: mol_type = other DNA
acctcaacgctgggcagagg

SEQ ID NO: 284300 - DNA, 20 bp, synthetic construct
  source 1..20: mol_type = other DNA
cacctcaacgctgggcagag

SEQ ID NO: 284301 - DNA, 20 bp, synthetic construct
  source 1..20: mol_type = other DNA
acacctcaacgctgggcaga

SEQ ID NO: 284302 - DNA, 20 bp, synthetic construct
  source 1..20: mol_type = other DNA
cacacctcaacgctgggcag

SEQ ID NO: 284303 - DNA, 20 bp, synthetic construct
  source 1..20: mol_type = other DNA
ccacacctcaacgctgggca

SEQ ID NO: 284304 - DNA, 20 bp, synthetic construct
  source 1..20: mol_type = other DNA
gccacacctcaacgctgggc

SEQ ID NO: 284305 - DNA, 20 bp, synthetic construct
  source 1..20: mol_type = other DNA
tgccacacctcaacgctggg

SEQ ID NO: 284306 - DNA, 20 bp, synthetic construct
  source 1..20: mol_type = other DNA
ctgccacacctcaacgctgg

SEQ ID NO: 284307 - DNA, 20 bp, synthetic construct
  source 1..20: mol_type = other DNA
tctgccacacctcaacgctg

SEQ ID NO: 284308 - DNA, 20 bp, synthetic construct
  source 1..20: mol_type = other DNA
ctctgccacacctcaacgct

SEQ ID NO: 284309 - DNA, 20 bp, synthetic construct
  source 1..20: mol_type = other DNA
tctctgccacacctcaacgc

SEQ ID NO: 284310 - DNA, 20 bp, synthetic construct
  source 1..20: mol_type = other DNA
ttctctgccacacctcaacg

SEQ ID NO: 284311 - DNA, 20 bp, synthetic construct
  source 1..20: mol_type = other DNA
tttctctgccacacctcaac

SEQ ID NO: 284312 - DNA, 20 bp, synthetic construct
  source 1..20: mol_type = other DNA
atttctctgccacacctcaa

SEQ ID NO: 284313 - DNA, 20 bp, synthetic construct
  source 1..20: mol_type = other DNA
catttctctgccacacctca

SEQ ID NO: 284314 - DNA, 20 bp, synthetic construct
  source 1..20: mol_type = other DNA
gcatttctctgccacacctc

SEQ ID NO: 284315 - DNA, 20 bp, synthetic construct
  source 1..20: mol_type = other DNA
agcatttctctgccacacct

SEQ ID NO: 284316 - DNA, 20 bp, synthetic construct
  source 1..20: mol_type = other DNA
cagcatttctctgccacacc

SEQ ID NO: 284317 - DNA, 20 bp, synthetic construct
  source 1..20: mol_type = other DNA
gcagcatttctctgccacac

SEQ ID NO: 284318 - DNA, 20 bp, synthetic construct
  source 1..20: mol_type = other DNA
agcagcatttctctgccaca

SEQ ID NO: 284319 - DNA, 20 bp, synthetic construct
  source 1..20: mol_type = other DNA
aagcagcatttctctgccac

SEQ ID NO: 284320 - DNA, 20 bp, synthetic construct
  source 1..20: mol_type = other DNA
aaagcagcatttctctgcca

SEQ ID NO: 284321 - DNA, 20 bp, synthetic construct
  source 1..20: mol_type = other DNA
aaaagcagcatttctctgcc

SEQ ID NO: 284322 - DNA, 20 bp, synthetic construct
  source 1..20: mol_type = other DNA
caaaagcagcatttctctgc

SEQ ID NO: 284323 - DNA, 20 bp, synthetic construct
  source 1..20: mol_type = other DNA
ccaaaagcagcatttctctg

SEQ ID NO: 284324 - DNA, 20 bp, synthetic construct
  source 1..20: mol_type = other DNA
gccaaaagcagcatttctct

SEQ ID NO: 284325 - DNA, 20 bp, synthetic construct
  source 1..20: mol_type = other DNA
ggccaaaagcagcatttctc

SEQ ID NO: 284326 - DNA, 20 bp, synthetic construct
  source 1..20: mol_type = other DNA
gggccaaaagcagcatttct

SEQ ID NO: 284327 - DNA, 20 bp, synthetic construct
  source 1..20: mol_type = other DNA
agggccaaaagcagcatttc

SEQ ID NO: 284328 - DNA, 20 bp, synthetic construct
  source 1..20: mol_type = other DNA
aagggccaaaagcagcattt

SEQ ID NO: 284329 - DNA, 20 bp, synthetic construct
  source 1..20: mol_type = other DNA
aaagggccaaaagcagcatt

SEQ ID NO: 284330 - DNA, 20 bp, synthetic construct
  source 1..20: mol_type = other DNA
aaaagggccaaaagcagcat

SEQ ID NO: 284331 - DNA, 20 bp, synthetic construct
  source 1..20: mol_type = other DNA
taaaagggccaaaagcagca

SEQ ID NO: 284332 - DNA, 20 bp, synthetic construct
  source 1..20: mol_type = other DNA
ctaaaagggccaaaagcagc

SEQ ID NO: 284333 - DNA, 20 bp, synthetic construct
  source 1..20: mol_type = other DNA
tctaaaagggccaaaagcag

SEQ ID NO: 284334 - DNA, 20 bp, synthetic construct
  source 1..20: mol_type = other DNA
atctaaaagggccaaaagca

SEQ ID NO: 284335 - DNA, 20 bp, synthetic construct
  source 1..20: mol_type = other DNA
aatctaaaagggccaaaagc

SEQ ID NO: 284336 - DNA, 20 bp, synthetic construct
  source 1..20: mol_type = other DNA
aaatctaaaagggccaaaag

SEQ ID NO: 284337 - DNA, 20 bp, synthetic construct
  source 1..20: mol_type = other DNA
caaatctaaaagggccaaaa

SEQ ID NO: 284338 - DNA, 20 bp, synthetic construct
  source 1..20: mol_type = other DNA
ccaaatctaaaagggccaaa

SEQ ID NO: 284339 - DNA, 20 bp, synthetic construct
  source 1..20: mol_type = other DNA
gccaaatctaaaagggccaa

SEQ ID NO: 284340 - DNA, 20 bp, synthetic construct
  source 1..20: mol_type = other DNA
agccaaatctaaaagggcca

SEQ ID NO: 284341 - DNA, 20 bp, synthetic construct
  source 1..20: mol_type = other DNA
cagccaaatctaaaagggcc

SEQ ID NO: 284342 - DNA, 20 bp, synthetic construct
  source 1..20: mol_type = other DNA
gcagccaaatctaaaagggc

SEQ ID NO: 284343 - DNA, 20 bp, synthetic construct
  source 1..20: mol_type = other DNA
ggcagccaaatctaaaaggg

SEQ ID NO: 284344 - DNA, 20 bp, synthetic construct
  source 1..20: mol_type = other DNA
aggcagccaaatctaaaagg

SEQ ID NO: 284345 - DNA, 20 bp, synthetic construct
  source 1..20: mol_type = other DNA
gaggcagccaaatctaaaag

SEQ ID NO: 284346 - DNA, 20 bp, synthetic construct
  source 1..20: mol_type = other DNA
agaggcagccaaatctaaaa

SEQ ID NO: 284347 - DNA, 20 bp, synthetic construct
  source 1..20: mol_type = other DNA
aagaggcagccaaatctaaa

SEQ ID NO: 284348 - DNA, 20 bp, synthetic construct
  source 1..20: mol_type = other DNA
caagaggcagccaaatctaa

SEQ ID NO: 284349 - DNA, 20 bp, synthetic construct
  source 1..20: mol_type = other DNA
gcaagaggcagccaaatcta

SEQ ID NO: 284350 - DNA, 20 bp, synthetic construct
  source 1..20: mol_type = other DNA
ggcaagaggcagccaaatct

SEQ ID NO: 284351 - DNA, 20 bp, synthetic construct
  source 1..20: mol_type = other DNA
tggcaagaggcagccaaatc

SEQ ID NO: 284352 - DNA, 20 bp, synthetic construct
  source 1..20: mol_type = other DNA
ctggcaagaggcagccaaat

SEQ ID NO: 284353 - DNA, 20 bp, synthetic construct
  source 1..20: mol_type = other DNA
cctggcaagaggcagccaaa

SEQ ID NO: 284354 - DNA, 20 bp, synthetic construct
  source 1..20: mol_type = other DNA
tcctggcaagaggcagccaa

SEQ ID NO: 284355 - DNA, 20 bp, synthetic construct
  source 1..20: mol_type = other DNA
ctcctggcaagaggcagcca

SEQ ID NO: 284356 - DNA, 20 bp, synthetic construct
  source 1..20: mol_type = other DNA
actcctggcaagaggcagcc

SEQ ID NO: 284357 - DNA, 20 bp, synthetic construct
  source 1..20: mol_type = other DNA
cactcctggcaagaggcagc

SEQ ID NO: 284358 - DNA, 20 bp, synthetic construct
  source 1..20: mol_type = other DNA
ccactcctggcaagaggcag

SEQ ID NO: 284359 - DNA, 20 bp, synthetic construct
  source 1..20: mol_type = other DNA
accactcctggcaagaggca

SEQ ID NO: 284360 - DNA, 20 bp, synthetic construct
  source 1..20: mol_type = other DNA
caccactcctggcaagaggc

SEQ ID NO: 284361 - DNA, 20 bp, synthetic construct
  source 1..20: mol_type = other DNA
ccaccactcctggcaagagg

SEQ ID NO: 284362 - DNA, 20 bp, synthetic construct
  source 1..20: mol_type = other DNA
gccaccactcctggcaagag

SEQ ID NO: 284363 - DNA, 20 bp, synthetic construct
  source 1..20: mol_type = other DNA
agccaccactcctggcaaga

SEQ ID NO: 284364 - DNA, 20 bp, synthetic construct
  source 1..20: mol_type = other DNA
gagccaccactcctggcaag

SEQ ID NO: 284365 - DNA, 20 bp, synthetic construct
  source 1..20: mol_type = other DNA
cgagccaccactcctggcaa

SEQ ID NO: 284366 - DNA, 20 bp, synthetic construct
  source 1..20: mol_type = other DNA
acgagccaccactcctggca

SEQ ID NO: 284367 - DNA, 20 bp, synthetic construct
  source 1..20: mol_type = other DNA
cacgagccaccactcctggc

SEQ ID NO: 284368 - DNA, 20 bp, synthetic construct
  source 1..20: mol_type = other DNA
gcacgagccaccactcctgg

SEQ ID NO: 284369 - DNA, 20 bp, synthetic construct
  source 1..20: mol_type = other DNA
ggcacgagccaccactcctg

SEQ ID NO: 284370 - DNA, 20 bp, synthetic construct
  source 1..20: mol_type = other DNA
aggcacgagccaccactcct

SEQ ID NO: 284371 - DNA, 20 bp, synthetic construct
  source 1..20: mol_type = other DNA
caggcacgagccaccactcc

SEQ ID NO: 284372 - DNA, 20 bp, synthetic construct
  source 1..20: mol_type = other DNA
acaggcacgagccaccactc

SEQ ID NO: 284373 - DNA, 20 bp, synthetic construct
  source 1..20: mol_type = other DNA
tacaggcacgagccaccact

SEQ ID NO: 284374 - DNA, 20 bp, synthetic construct
  source 1..20: mol_type = other DNA
ttacaggcacgagccaccac

SEQ ID NO: 284375 - DNA, 20 bp, synthetic construct
  source 1..20: mol_type = other DNA
attacaggcacgagccacca

SEQ ID NO: 284376 - DNA, 20 bp, synthetic construct
  source 1..20: mol_type = other DNA
aattacaggcacgagccacc

SEQ ID NO: 284377 - DNA, 20 bp, synthetic construct
  source 1..20: mol_type = other DNA
gaattacaggcacgagccac

SEQ ID NO: 284378 - DNA, 20 bp, synthetic construct
  source 1..20: mol_type = other DNA
ggaattacaggcacgagcca

SEQ ID NO: 284379 - DNA, 20 bp, synthetic construct
  source 1..20: mol_type = other DNA
tggaattacaggcacgagcc

SEQ ID NO: 284380 - DNA, 20 bp, synthetic construct
  source 1..20: mol_type = other DNA
ctggaattacaggcacgagc

SEQ ID NO: 284381 - DNA, 20 bp, synthetic construct
  source 1..20: mol_type = other DNA
gctggaattacaggcacgag

SEQ ID NO: 284382 - DNA, 20 bp, synthetic construct
  source 1..20: mol_type = other DNA
tgctggaattacaggcacga

SEQ ID NO: 284383 - DNA, 20 bp, synthetic construct
  source 1..20: mol_type = other DNA
gtgctggaattacaggcacg

SEQ ID NO: 284384 - DNA, 20 bp, synthetic construct
  source 1..20: mol_type = other DNA
agtgctggaattacaggcac

SEQ ID NO: 284385 - DNA, 20 bp, synthetic construct
  source 1..20: mol_type = other DNA
aagtgctggaattacaggca

SEQ ID NO: 284386 - DNA, 20 bp, synthetic construct
  source 1..20: mol_type = other DNA
aaagtgctggaattacaggc

SEQ ID NO: 284387 - DNA, 20 bp, synthetic construct
  source 1..20: mol_type = other DNA
caaagtgctggaattacagg

SEQ ID NO: 284388 - DNA, 20 bp, synthetic construct
  source 1..20: mol_type = other DNA
ccaaagtgctggaattacag

SEQ ID NO: 284389 - DNA, 20 bp, synthetic construct
  source 1..20: mol_type = other DNA
cccaaagtgctggaattaca

SEQ ID NO: 284390 - DNA, 20 bp, synthetic construct
  source 1..20: mol_type = other DNA
tcccaaagtgctggaattac

SEQ ID NO: 284391 - DNA, 20 bp, synthetic construct
  source 1..20: mol_type = other DNA
ctcccaaagtgctggaatta

SEQ ID NO: 284392 - DNA, 20 bp, synthetic construct
  source 1..20: mol_type = other DNA
tctcccaaagtgctggaatt

SEQ ID NO: 284393 - DNA, 20 bp, synthetic construct
  source 1..20: mol_type = other DNA
gtctcccaaagtgctggaat

SEQ ID NO: 284394 - DNA, 20 bp, synthetic construct
  source 1..20: mol_type = other DNA
agtctcccaaagtgctggaa

SEQ ID NO: 284395 - DNA, 20 bp, synthetic construct
  source 1..20: mol_type = other DNA
tagtctcccaaagtgctgga

SEQ ID NO: 284396 - DNA, 20 bp, synthetic construct
  source 1..20: mol_type = other DNA
ttagtctcccaaagtgctgg

SEQ ID NO: 284397 - DNA, 20 bp, synthetic construct
  source 1..20: mol_type = other DNA
cttagtctcccaaagtgctg

SEQ ID NO: 284398 - DNA, 20 bp, synthetic construct
  source 1..20: mol_type = other DNA
ccttagtctcccaaagtgct

SEQ ID NO: 284399 - DNA, 20 bp, synthetic construct
  source 1..20: mol_type = other DNA
gccttagtctcccaaagtgc

SEQ ID NO: 284400 - DNA, 20 bp, synthetic construct
  source 1..20: mol_type = other DNA
cgccttagtctcccaaagtg

SEQ ID NO: 284401 - DNA, 20 bp, synthetic construct
  source 1..20: mol_type = other DNA
ccgccttagtctcccaaagt

SEQ ID NO: 284402 - DNA, 20 bp, synthetic construct
  source 1..20: mol_type = other DNA
cccgccttagtctcccaaag

SEQ ID NO: 284403 - DNA, 20 bp, synthetic construct
  source 1..20: mol_type = other DNA
tcccgccttagtctcccaaa

SEQ ID NO: 284404 - DNA, 20 bp, synthetic construct
  source 1..20: mol_type = other DNA
ctcccgccttagtctcccaa

SEQ ID NO: 284405 - DNA, 20 bp, synthetic construct
  source 1..20: mol_type = other DNA
cctcccgccttagtctccca

SEQ ID NO: 284406 - DNA, 20 bp, synthetic construct
  source 1..20: mol_type = other DNA
acctcccgccttagtctccc

SEQ ID NO: 284407 - DNA, 20 bp, synthetic construct
  source 1..20: mol_type = other DNA
aacctcccgccttagtctcc

SEQ ID NO: 284408 - DNA, 20 bp, synthetic construct
  source 1..20: mol_type = other DNA
gaacctcccgccttagtctc

SEQ ID NO: 284409 - DNA, 20 bp, synthetic construct
  source 1..20: mol_type = other DNA
cgaacctcccgccttagtct

SEQ ID NO: 284410 - DNA, 20 bp, synthetic construct
  source 1..20: mol_type = other DNA
gcgaacctcccgccttagtc

SEQ ID NO: 284411 - DNA, 20 bp, synthetic construct
  source 1..20: mol_type = other DNA
agcgaacctcccgccttagt

SEQ ID NO: 284412 - DNA, 20 bp, synthetic construct
  source 1..20: mol_type = other DNA
aagcgaacctcccgccttag

SEQ ID NO: 284413 - DNA, 20 bp, synthetic construct
  source 1..20: mol_type = other DNA
caagcgaacctcccgcctta

SEQ ID NO: 284414 - DNA, 20 bp, synthetic construct
  source 1..20: mol_type = other DNA
tcaagcgaacctcccgcctt

SEQ ID NO: 284415 - DNA, 20 bp, synthetic construct
  source 1..20: mol_type = other DNA
ctcaagcgaacctcccgcct

SEQ ID NO: 284416 - DNA, 20 bp, synthetic construct
  source 1..20: mol_type = other DNA
gctcaagcgaacctcccgcc

SEQ ID NO: 284417 - DNA, 20 bp, synthetic construct
  source 1..20: mol_type = other DNA
ggctcaagcgaacctcccgc

SEQ ID NO: 284418 - DNA, 20 bp, synthetic construct
  source 1..20: mol_type = other DNA
gggctcaagcgaacctcccg

SEQ ID NO: 284419 - DNA, 20 bp, synthetic construct
  source 1..20: mol_type = other DNA
tgggctcaagcgaacctccc

SEQ ID NO: 284420 - DNA, 20 bp, synthetic construct
  source 1..20: mol_type = other DNA
ctgggctcaagcgaacctcc

SEQ ID NO: 284421 - DNA, 20 bp, synthetic construct
  source 1..20: mol_type = other DNA
cctgggctcaagcgaacctc

SEQ ID NO: 284422 - DNA, 20 bp, synthetic construct
  source 1..20: mol_type = other DNA
tcctgggctcaagcgaacct

SEQ ID NO: 284423 - DNA, 20 bp, synthetic construct
  source 1..20: mol_type = other DNA
ctcctgggctcaagcgaacc

SEQ ID NO: 284424 - DNA, 20 bp, synthetic construct
  source 1..20: mol_type = other DNA
actcctgggctcaagcgaac

SEQ ID NO: 284425 - DNA, 20 bp, synthetic construct
  source 1..20: mol_type = other DNA
aactcctgggctcaagcgaa

SEQ ID NO: 284426 - DNA, 20 bp, synthetic construct
  source 1..20: mol_type = other DNA
gaactcctgggctcaagcga

SEQ ID NO: 284427 - DNA, 20 bp, synthetic construct
  source 1..20: mol_type = other DNA
tgaactcctgggctcaagcg

SEQ ID NO: 284428 - DNA, 20 bp, synthetic construct
  source 1..20: mol_type = other DNA
ttgaactcctgggctcaagc

SEQ ID NO: 284429 - DNA, 20 bp, synthetic construct
  source 1..20: mol_type = other DNA
cttgaactcctgggctcaag

SEQ ID NO: 284430 - DNA, 20 bp, synthetic construct
  source 1..20: mol_type = other DNA
tcttgaactcctgggctcaa

SEQ ID NO: 284431 - DNA, 20 bp, synthetic construct
  source 1..20: mol_type = other DNA
gtcttgaactcctgggctca

SEQ ID NO: 284432 - DNA, 20 bp, synthetic construct
  source 1..20: mol_type = other DNA
ggtcttgaactcctgggctc

SEQ ID NO: 284433 - DNA, 20 bp, synthetic construct
  source 1..20: mol_type = other DNA
tggtcttgaactcctgggct

SEQ ID NO: 284434 - DNA, 20 bp, synthetic construct
  source 1..20: mol_type = other DNA
ctggtcttgaactcctgggc

SEQ ID NO: 284435 - DNA, 20 bp, synthetic construct
  source 1..20: mol_type = other DNA
gctggtcttgaactcctggg

SEQ ID NO: 284436 - DNA, 20 bp, synthetic construct
  source 1..20: mol_type = other DNA
ggctggtcttgaactcctgg

SEQ ID NO: 284437 - DNA, 20 bp, synthetic construct
  source 1..20: mol_type = other DNA
aggctggtcttgaactcctg

SEQ ID NO: 284438 - DNA, 20 bp, synthetic construct
  source 1..20: mol_type = other DNA
caggctggtcttgaactcct

SEQ ID NO: 284439 - DNA, 20 bp, synthetic construct
  source 1..20: mol_type = other DNA
ccaggctggtcttgaactcc

SEQ ID NO: 284440 - DNA, 20 bp, synthetic construct
  source 1..20: mol_type = other DNA
cccaggctggtcttgaactc

SEQ ID NO: 284441 - DNA, 20 bp, synthetic construct
  source 1..20: mol_type = other DNA
gcccaggctggtcttgaact

SEQ ID NO: 284442 - DNA, 20 bp, synthetic construct
  source 1..20: mol_type = other DNA
tgcccaggctggtcttgaac

SEQ ID NO: 284443 - DNA, 20 bp, synthetic construct
  source 1..20: mol_type = other DNA
ttgcccaggctggtcttgaa

SEQ ID NO: 284444 - DNA, 20 bp, synthetic construct
  source 1..20: mol_type = other DNA
gttgcccaggctggtcttga

SEQ ID NO: 284445 - DNA, 20 bp, synthetic construct
  source 1..20: mol_type = other DNA
tgttgcccaggctggtcttg

SEQ ID NO: 284446 - DNA, 20 bp, synthetic construct
  source 1..20: mol_type = other DNA
ttgttgcccaggctggtctt

SEQ ID NO: 284447 - DNA, 20 bp, synthetic construct
  source 1..20: mol_type = other DNA
attgttgcccaggctggtct

SEQ ID NO: 284448 - DNA, 20 bp, synthetic construct
  source 1..20: mol_type = other DNA
cattgttgcccaggctggtc

SEQ ID NO: 284449 - DNA, 20 bp, synthetic construct
  source 1..20: mol_type = other DNA
tcattgttgcccaggctggt

SEQ ID NO: 284450 - DNA, 20 bp, synthetic construct
  source 1..20: mol_type = other DNA
ctcattgttgcccaggctgg

SEQ ID NO: 284451 - DNA, 20 bp, synthetic construct
  source 1..20: mol_type = other DNA
tctcattgttgcccaggctg

SEQ ID NO: 284452 - DNA, 20 bp, synthetic construct
  source 1..20: mol_type = other DNA
gtctcattgttgcccaggct

SEQ ID NO: 284453 - DNA, 20 bp, synthetic construct
  source 1..20: mol_type = other DNA
ggtctcattgttgcccaggc

SEQ ID NO: 284454 - DNA, 20 bp, synthetic construct
  source 1..20: mol_type = other DNA
gggtctcattgttgcccagg

SEQ ID NO: 284455 - DNA, 20 bp, synthetic construct
  source 1..20: mol_type = other DNA
ggggtctcattgttgcccag

SEQ ID NO: 284456 - DNA, 20 bp, synthetic construct
  source 1..20: mol_type = other DNA
aggggtctcattgttgccca

SEQ ID NO: 284457 - DNA, 20 bp, synthetic construct
  source 1..20: mol_type = other DNA
caggggtctcattgttgccc

SEQ ID NO: 284458 - DNA, 20 bp, synthetic construct
  source 1..20: mol_type = other DNA
acaggggtctcattgttgcc

SEQ ID NO: 284459 - DNA, 20 bp, synthetic construct
  source 1..20: mol_type = other DNA
cacaggggtctcattgttgc

SEQ ID NO: 284460 - DNA, 20 bp, synthetic construct
  source 1..20: mol_type = other DNA
acacaggggtctcattgttg

SEQ ID NO: 284461 - DNA, 20 bp, synthetic construct
  source 1..20: mol_type = other DNA
gacacaggggtctcattgtt

SEQ ID NO: 284462 - DNA, 20 bp, synthetic construct
  source 1..20: mol_type = other DNA
agacacaggggtctcattgt

SEQ ID NO: 284463 - DNA, 20 bp, synthetic construct
  source 1..20: mol_type = other DNA
tagacacaggggtctcattg

SEQ ID NO: 284464 - DNA, 20 bp, synthetic construct
  source 1..20: mol_type = other DNA
gtagacacaggggtctcatt

SEQ ID NO: 284465 - DNA, 20 bp, synthetic construct
  source 1..20: mol_type = other DNA
tgtagacacaggggtctcat

SEQ ID NO: 284466 - DNA, 20 bp, synthetic construct
  source 1..20: mol_type = other DNA
ttgtagacacaggggtctca

SEQ ID NO: 284467 - DNA, 20 bp, synthetic construct
  source 1..20: mol_type = other DNA
tttgtagacacaggggtctc

SEQ ID NO: 284468 - DNA, 20 bp, synthetic construct
  source 1..20: mol_type = other DNA
ttttgtagacacaggggtct

SEQ ID NO: 284469 - DNA, 20 bp, synthetic construct
  source 1..20: mol_type = other DNA
tttttgtagacacaggggtc

SEQ ID NO: 284470 - DNA, 20 bp, synthetic construct
  source 1..20: mol_type = other DNA
ctttttgtagacacaggggt

SEQ ID NO: 284471 - DNA, 20 bp, synthetic construct
  source 1..20: mol_type = other DNA
tctttttgtagacacagggg

SEQ ID NO: 284472 - DNA, 20 bp, synthetic construct
  source 1..20: mol_type = other DNA
ttctttttgtagacacaggg

SEQ ID NO: 284473 - DNA, 20 bp, synthetic construct
  source 1..20: mol_type = other DNA
attctttttgtagacacagg

SEQ ID NO: 284474 - DNA, 20 bp, synthetic construct
  source 1..20: mol_type = other DNA
aattctttttgtagacacag

SEQ ID NO: 284475 - DNA, 20 bp, synthetic construct
  source 1..20: mol_type = other DNA
taattctttttgtagacaca

SEQ ID NO: 284476 - DNA, 20 bp, synthetic construct
  source 1..20: mol_type = other DNA
ttaattctttttgtagacac

SEQ ID NO: 284477 - DNA, 20 bp, synthetic construct
  source 1..20: mol_type = other DNA
tttaattctttttgtagaca

SEQ ID NO: 284478 - DNA, 20 bp, synthetic construct
  source 1..20: mol_type = other DNA
ttttaattctttttgtagac

SEQ ID NO: 284479 - DNA, 20 bp, synthetic construct
  source 1..20: mol_type = other DNA
attttaattctttttgtaga

SEQ ID NO: 284480 - DNA, 20 bp, synthetic construct
  source 1..20: mol_type = other DNA
aattttaattctttttgtag

SEQ ID NO: 284481 - DNA, 20 bp, synthetic construct
  source 1..20: mol_type = other DNA
taattttaattctttttgta

SEQ ID NO: 284482 - DNA, 20 bp, synthetic construct
  source 1..20: mol_type = other DNA
ctaattttaattctttttgt

SEQ ID NO: 284483 - DNA, 20 bp, synthetic construct
  source 1..20: mol_type = other DNA
gctaattttaattctttttg

SEQ ID NO: 284484 - DNA, 20 bp, synthetic construct
  source 1..20: mol_type = other DNA
ggctaattttaattcttttt

SEQ ID NO: 284485 - DNA, 20 bp, synthetic construct
  source 1..20: mol_type = other DNA
tggctaattttaattctttt

SEQ ID NO: 284486 - DNA, 20 bp, synthetic construct
  source 1..20: mol_type = other DNA
ctggctaattttaattcttt

SEQ ID NO: 284487 - DNA, 20 bp, synthetic construct
  source 1..20: mol_type = other DNA
cctggctaattttaattctt

SEQ ID NO: 284488 - DNA, 20 bp, synthetic construct
  source 1..20: mol_type = other DNA
acctggctaattttaattct

SEQ ID NO: 284489 - DNA, 20 bp, synthetic construct
  source 1..20: mol_type = other DNA
cacctggctaattttaattc

SEQ ID NO: 284490 - DNA, 20 bp, synthetic construct
  source 1..20: mol_type = other DNA
acacctggctaattttaatt

SEQ ID NO: 284491 - DNA, 20 bp, synthetic construct
  source 1..20: mol_type = other DNA
cacacctggctaattttaat

SEQ ID NO: 284492 - DNA, 20 bp, synthetic construct
  source 1..20: mol_type = other DNA
ccacacctggctaattttaa

SEQ ID NO: 284493 - DNA, 20 bp, synthetic construct
  source 1..20: mol_type = other DNA
accacacctggctaatttta

SEQ ID NO: 284494 - DNA, 20 bp, synthetic construct
  source 1..20: mol_type = other DNA
caccacacctggctaatttt

SEQ ID NO: 284495 - DNA, 20 bp, synthetic construct
  source 1..20: mol_type = other DNA
ccaccacacctggctaattt

SEQ ID NO: 284496 - DNA, 20 bp, synthetic construct
  source 1..20: mol_type = other DNA
gccaccacacctggctaatt

SEQ ID NO: 284497 - DNA, 20 bp, synthetic construct
  source 1..20: mol_type = other DNA
tgccaccacacctggctaat

SEQ ID NO: 284498 - DNA, 20 bp, synthetic construct
  source 1..20: mol_type = other DNA
gtgccaccacacctggctaa

SEQ ID NO: 284499 - DNA, 20 bp, synthetic construct
  source 1..20: mol_type = other DNA
cgtgccaccacacctggcta

SEQ ID NO: 284500 - DNA, 20 bp, synthetic construct
  source 1..20: mol_type = other DNA
gcgtgccaccacacctggct

SEQ ID NO: 284501 - DNA, 20 bp, synthetic construct
  source 1..20: mol_type = other DNA
tgcgtgccaccacacctggc

SEQ ID NO: 284502 - DNA, 20 bp, synthetic construct
  source 1..20: mol_type = other DNA
gtgcgtgccaccacacctgg

SEQ ID NO: 284503 - DNA, 20 bp, synthetic construct
  source 1..20: mol_type = other DNA
ggtgcgtgccaccacacctg

SEQ ID NO: 284504 - DNA, 20 bp, synthetic construct
  source 1..20: mol_type = other DNA
aggtgcgtgccaccacacct

SEQ ID NO: 284505 - DNA, 20 bp, synthetic construct
  source 1..20: mol_type = other DNA
caggtgcgtgccaccacacc

SEQ ID NO: 284506 - DNA, 20 bp, synthetic construct
  source 1..20: mol_type = other DNA
acaggtgcgtgccaccacac

SEQ ID NO: 284507 - DNA, 20 bp, synthetic construct
  source 1..20: mol_type = other DNA
tacaggtgcgtgccaccaca

SEQ ID NO: 284508 - DNA, 20 bp, synthetic construct
  source 1..20: mol_type = other DNA
ctacaggtgcgtgccaccac

SEQ ID NO: 284509 - DNA, 20 bp, synthetic construct
  source 1..20: mol_type = other DNA
actacaggtgcgtgccacca

SEQ ID NO: 284510 - DNA, 20 bp, synthetic construct
  source 1..20: mol_type = other DNA
gactacaggtgcgtgccacc

SEQ ID NO: 284511 - DNA, 20 bp, synthetic construct
  source 1..20: mol_type = other DNA
ggactacaggtgcgtgccac

SEQ ID NO: 284512 - DNA, 20 bp, synthetic construct
  source 1..20: mol_type = other DNA
gggactacaggtgcgtgcca

SEQ ID NO: 284513 - DNA, 20 bp, synthetic construct
  source 1..20: mol_type = other DNA
tgggactacaggtgcgtgcc

SEQ ID NO: 284514 - DNA, 20 bp, synthetic construct
  source 1..20: mol_type = other DNA
ctgggactacaggtgcgtgc

SEQ ID NO: 284515 - DNA, 20 bp, synthetic construct
  source 1..20: mol_type = other DNA
gctgggactacaggtgcgtg

SEQ ID NO: 284516 - DNA, 20 bp, synthetic construct
  source 1..20: mol_type = other DNA
agctgggactacaggtgcgt

SEQ ID NO: 284517 - DNA, 20 bp, synthetic construct
  source 1..20: mol_type = other DNA
tagctgggactacaggtgcg

SEQ ID NO: 284518 - DNA, 20 bp, synthetic construct
  source 1..20: mol_type = other DNA
gtagctgggactacaggtgc

SEQ ID NO: 284519 - DNA, 20 bp, synthetic construct
  source 1..20: mol_type = other DNA
agtagctgggactacaggtg

SEQ ID NO: 284520 - DNA, 20 bp, synthetic construct
  source 1..20: mol_type = other DNA
aagtagctgggactacaggt

SEQ ID NO: 284521 - DNA, 20 bp, synthetic construct
  source 1..20: mol_type = other DNA
caagtagctgggactacagg

SEQ ID NO: 284522 - DNA, 20 bp, synthetic construct
  source 1..20: mol_type = other DNA
ccaagtagctgggactacag

SEQ ID NO: 284523 - DNA, 20 bp, synthetic construct
  source 1..20: mol_type = other DNA
cccaagtagctgggactaca

SEQ ID NO: 284524 - DNA, 20 bp, synthetic construct
  source 1..20: mol_type = other DNA
tcccaagtagctgggactac

SEQ ID NO: 284525 - DNA, 20 bp, synthetic construct
  source 1..20: mol_type = other DNA
ctcccaagtagctgggacta

SEQ ID NO: 284526 - DNA, 20 bp, synthetic construct
  source 1..20: mol_type = other DNA
cctcccaagtagctgggact

SEQ ID NO: 284527 - DNA, 20 bp, synthetic construct
  source 1..20: mol_type = other DNA
gcctcccaagtagctgggac

SEQ ID NO: 284528 - DNA, 20 bp, synthetic construct
  source 1..20: mol_type = other DNA
agcctcccaagtagctggga

SEQ ID NO: 284529 - DNA, 20 bp, synthetic construct
  source 1..20: mol_type = other DNA
cagcctcccaagtagctggg

SEQ ID NO: 284530 - DNA, 20 bp, synthetic construct
  source 1..20: mol_type = other DNA
tcagcctcccaagtagctgg

SEQ ID NO: 284531 - DNA, 20 bp, synthetic construct
  source 1..20: mol_type = other DNA
ctcagcctcccaagtagctg

SEQ ID NO: 284532 - DNA, 20 bp, synthetic construct
  source 1..20: mol_type = other DNA
cctcagcctcccaagtagct

SEQ ID NO: 284533 - DNA, 20 bp, synthetic construct
  source 1..20: mol_type = other DNA
acctcagcctcccaagtagc

SEQ ID NO: 284534 - DNA, 20 bp, synthetic construct
  source 1..20: mol_type = other DNA
cacctcagcctcccaagtag

SEQ ID NO: 284535 - DNA, 20 bp, synthetic construct
  source 1..20: mol_type = other DNA
ccacctcagcctcccaagta

SEQ ID NO: 284536 - DNA, 20 bp, synthetic construct
  source 1..20: mol_type = other DNA
cccacctcagcctcccaagt

SEQ ID NO: 284537 - DNA, 20 bp, synthetic construct
  source 1..20: mol_type = other DNA
tcccacctcagcctcccaag

SEQ ID NO: 284538 - DNA, 20 bp, synthetic construct
  source 1..20: mol_type = other DNA
ctcccacctcagcctcccaa

SEQ ID NO: 284539 - DNA, 20 bp, synthetic construct
  source 1..20: mol_type = other DNA
cctcccacctcagcctccca

SEQ ID NO: 284540 - DNA, 20 bp, synthetic construct
  source 1..20: mol_type = other DNA
tcctcccacctcagcctccc

SEQ ID NO: 284541 - DNA, 20 bp, synthetic construct
  source 1..20: mol_type = other DNA
atcctcccacctcagcctcc

SEQ ID NO: 284542 - DNA, 20 bp, synthetic construct
  source 1..20: mol_type = other DNA
aatcctcccacctcagcctc

SEQ ID NO: 284543 - DNA, 20 bp, synthetic construct
  source 1..20: mol_type = other DNA
caatcctcccacctcagcct

SEQ ID NO: 284544 - DNA, 20 bp, synthetic construct
  source 1..20: mol_type = other DNA
gcaatcctcccacctcagcc

SEQ ID NO: 284545 - DNA, 20 bp, synthetic construct
  source 1..20: mol_type = other DNA
ggcaatcctcccacctcagc

SEQ ID NO: 284546 - DNA, 20 bp, synthetic construct
  source 1..20: mol_type = other DNA
aggcaatcctcccacctcag

SEQ ID NO: 284547 - DNA, 20 bp, synthetic construct
  source 1..20: mol_type = other DNA
caggcaatcctcccacctca

SEQ ID NO: 284548 - DNA, 20 bp, synthetic construct
  source 1..20: mol_type = other DNA
tcaggcaatcctcccacctc

SEQ ID NO: 284549 - DNA, 20 bp, synthetic construct
  source 1..20: mol_type = other DNA
ctcaggcaatcctcccacct

SEQ ID NO: 284550 - DNA, 20 bp, synthetic construct
  source 1..20: mol_type = other DNA
actcaggcaatcctcccacc

SEQ ID NO: 284551 - DNA, 20 bp, synthetic construct
  source 1..20: mol_type = other DNA
gactcaggcaatcctcccac

SEQ ID NO: 284552 - DNA, 20 bp, synthetic construct
  source 1..20: mol_type = other DNA
ggactcaggcaatcctccca

SEQ ID NO: 284553 - DNA, 20 bp, synthetic construct
  source 1..20: mol_type = other DNA
cggactcaggcaatcctccc

SEQ ID NO: 284554 - DNA, 20 bp, synthetic construct
  source 1..20: mol_type = other DNA
ccggactcaggcaatcctcc

SEQ ID NO: 284555 - DNA, 20 bp, synthetic construct
  source 1..20: mol_type = other DNA
cccggactcaggcaatcctc

SEQ ID NO: 284556 - DNA, 20 bp, synthetic construct
  source 1..20: mol_type = other DNA
tcccggactcaggcaatcct

SEQ ID NO: 284557 - DNA, 20 bp, synthetic construct
  source 1..20: mol_type = other DNA
ctcccggactcaggcaatcc

SEQ ID NO: 284558 - DNA, 20 bp, synthetic construct
  source 1..20: mol_type = other DNA
cctcccggactcaggcaatc

SEQ ID NO: 284559 - DNA, 20 bp, synthetic construct
  source 1..20: mol_type = other DNA
gcctcccggactcaggcaat

SEQ ID NO: 284560 - DNA, 20 bp, synthetic construct
  source 1..20: mol_type = other DNA
cgcctcccggactcaggcaa

SEQ ID NO: 284561 - DNA, 20 bp, synthetic construct
  source 1..20: mol_type = other DNA
ccgcctcccggactcaggca

SEQ ID NO: 284562 - DNA, 20 bp, synthetic construct
  source 1..20: mol_type = other DNA
tccgcctcccggactcaggc

SEQ ID NO: 284563 - DNA, 20 bp, synthetic construct
  source 1..20: mol_type = other DNA
ttccgcctcccggactcagg

SEQ ID NO: 284564 - DNA, 20 bp, synthetic construct
  source 1..20: mol_type = other DNA
cttccgcctcccggactcag

SEQ ID NO: 284565 - DNA, 20 bp, synthetic construct
  source 1..20: mol_type = other DNA
acttccgcctcccggactca

SEQ ID NO: 284566 - DNA, 20 bp, synthetic construct
  source 1..20: mol_type = other DNA
aacttccgcctcccggactc

SEQ ID NO: 284567 - DNA, 20 bp, synthetic construct
  source 1..20: mol_type = other DNA
caacttccgcctcccggact

SEQ ID NO: 284568 - DNA, 20 bp, synthetic construct
  source 1..20: mol_type = other DNA
gcaacttccgcctcccggac

SEQ ID NO: 284569 - DNA, 20 bp, synthetic construct
  source 1..20: mol_type = other DNA
tgcaacttccgcctcccgga

SEQ ID NO: 284570 - DNA, 20 bp, synthetic construct
  source 1..20: mol_type = other DNA
ttgcaacttccgcctcccgg

SEQ ID NO: 284571 - DNA, 20 bp, synthetic construct
  source 1..20: mol_type = other DNA
cttgcaacttccgcctcccg

SEQ ID NO: 284572 - DNA, 20 bp, synthetic construct
  source 1..20: mol_type = other DNA
ccttgcaacttccgcctccc

SEQ ID NO: 284573 - DNA, 20 bp, synthetic construct
  source 1..20: mol_type = other DNA
tccttgcaacttccgcctcc

SEQ ID NO: 284574 - DNA, 20 bp, synthetic construct
  source 1..20: mol_type = other DNA
ctccttgcaacttccgcctc

SEQ ID NO: 284575 - DNA, 20 bp, synthetic construct
  source 1..20: mol_type = other DNA
gctccttgcaacttccgcct

SEQ ID NO: 284576 - DNA, 20 bp, synthetic construct
  source 1..20: mol_type = other DNA
ggctccttgcaacttccgcc

SEQ ID NO: 284577 - DNA, 20 bp, synthetic construct
  source 1..20: mol_type = other DNA
tggctccttgcaacttccgc

SEQ ID NO: 284578 - DNA, 20 bp, synthetic construct
  source 1..20: mol_type = other DNA
atggctccttgcaacttccg

SEQ ID NO: 284579 - DNA, 20 bp, synthetic construct
  source 1..20: mol_type = other DNA
catggctccttgcaacttcc

SEQ ID NO: 284580 - DNA, 20 bp, synthetic construct
  source 1..20: mol_type = other DNA
tcatggctccttgcaacttc

SEQ ID NO: 284581 - DNA, 20 bp, synthetic construct
  source 1..20: mol_type = other DNA
atcatggctccttgcaactt

SEQ ID NO: 284582 - DNA, 20 bp, synthetic construct
  source 1..20: mol_type = other DNA
gatcatggctccttgcaact

SEQ ID NO: 284583 - DNA, 20 bp, synthetic construct
  source 1..20: mol_type = other DNA
cgatcatggctccttgcaac

SEQ ID NO: 284584 - DNA, 20 bp, synthetic construct
  source 1..20: mol_type = other DNA
gcgatcatggctccttgcaa

SEQ ID NO: 284585 - DNA, 20 bp, synthetic construct
  source 1..20: mol_type = other DNA
cgcgatcatggctccttgca

SEQ ID NO: 284586 - DNA, 20 bp, synthetic construct
  source 1..20: mol_type = other DNA
gcgcgatcatggctccttgc

SEQ ID NO: 284587 - DNA, 20 bp, synthetic construct
  source 1..20: mol_type = other DNA
ggcgcgatcatggctccttg

SEQ ID NO: 284588 - DNA, 20 bp, synthetic construct
  source 1..20: mol_type = other DNA
tggcgcgatcatggctcctt

SEQ ID NO: 284589 - DNA, 20 bp, synthetic construct
  source 1..20: mol_type = other DNA
gtggcgcgatcatggctcct

SEQ ID NO: 284590 - DNA, 20 bp, synthetic construct
  source 1..20: mol_type = other DNA
agtggcgcgatcatggctcc

SEQ ID NO: 284591 - DNA, 20 bp, synthetic construct
  source 1..20: mol_type = other DNA
cagtggcgcgatcatggctc

SEQ ID NO: 284592 - DNA, 20 bp, synthetic construct
  source 1..20: mol_type = other DNA
gcagtggcgcgatcatggct

SEQ ID NO: 284593 - DNA, 20 bp, synthetic construct
  source 1..20: mol_type = other DNA
tgcagtggcgcgatcatggc

SEQ ID NO: 284594 - DNA, 20 bp, synthetic construct
  source 1..20: mol_type = other DNA
gtgcagtggcgcgatcatgg

SEQ ID NO: 284595 - DNA, 20 bp, synthetic construct
  source 1..20: mol_type = other DNA
agtgcagtggcgcgatcatg

SEQ ID NO: 284596 - DNA, 20 bp, synthetic construct
  source 1..20: mol_type = other DNA
aagtgcagtggcgcgatcat

SEQ ID NO: 284597 - DNA, 20 bp, synthetic construct
  source 1..20: mol_type = other DNA
gaagtgcagtggcgcgatca

SEQ ID NO: 284598 - DNA, 20 bp, synthetic construct
  source 1..20: mol_type = other DNA
tgaagtgcagtggcgcgatc

SEQ ID NO: 284599 - DNA, 20 bp, synthetic construct
  source 1..20: mol_type = other DNA
ttgaagtgcagtggcgcgat

SEQ ID NO: 284600 - DNA, 20 bp, synthetic construct
  source 1..20: mol_type = other DNA
gttgaagtgcagtggcgcga

SEQ ID NO: 284601 - DNA, 20 bp, synthetic construct
  source 1..20: mol_type = other DNA
ggttgaagtgcagtggcgcg

SEQ ID NO: 284602 - DNA, 20 bp, synthetic construct
  source 1..20: mol_type = other DNA
aggttgaagtgcagtggcgc

SEQ ID NO: 284603 - DNA, 20 bp, synthetic construct
  source 1..20: mol_type = other DNA
taggttgaagtgcagtggcg

SEQ ID NO: 284604 - DNA, 20 bp, synthetic construct
  source 1..20: mol_type = other DNA
ctaggttgaagtgcagtggc

SEQ ID NO: 284605 - DNA, 20 bp, synthetic construct
  source 1..20: mol_type = other DNA
cctaggttgaagtgcagtgg

SEQ ID NO: 284606 - DNA, 20 bp, synthetic construct
  source 1..20: mol_type = other DNA
gcctaggttgaagtgcagtg

SEQ ID NO: 284607 - DNA, 20 bp, synthetic construct
  source 1..20: mol_type = other DNA
tgcctaggttgaagtgcagt

SEQ ID NO: 284608 - DNA, 20 bp, synthetic construct
  source 1..20: mol_type = other DNA
ttgcctaggttgaagtgcag

SEQ ID NO: 284609 - DNA, 20 bp, synthetic construct
  source 1..20: mol_type = other DNA
gttgcctaggttgaagtgca

SEQ ID NO: 284610 - DNA, 20 bp, synthetic construct
  source 1..20: mol_type = other DNA
tgttgcctaggttgaagtgc

SEQ ID NO: 284611 - DNA, 20 bp, synthetic construct
  source 1..20: mol_type = other DNA
ctgttgcctaggttgaagtg

SEQ ID NO: 284612 - DNA, 20 bp, synthetic construct
  source 1..20: mol_type = other DNA
tctgttgcctaggttgaagt

SEQ ID NO: 284613 - DNA, 20 bp, synthetic construct
  source 1..20: mol_type = other DNA
ctctgttgcctaggttgaag

SEQ ID NO: 284614 - DNA, 20 bp, synthetic construct
  source 1..20: mol_type = other DNA
actctgttgcctaggttgaa

SEQ ID NO: 284615 - DNA, 20 bp, synthetic construct
  source 1..20: mol_type = other DNA
cactctgttgcctaggttga

SEQ ID NO: 284616 - DNA, 20 bp, synthetic construct
  source 1..20: mol_type = other DNA
tcactctgttgcctaggttg

SEQ ID NO: 284617 - DNA, 20 bp, synthetic construct
  source 1..20: mol_type = other DNA
ctcactctgttgcctaggtt

SEQ ID NO: 284618 - DNA, 20 bp, synthetic construct
  source 1..20: mol_type = other DNA
tctcactctgttgcctaggt

SEQ ID NO: 284619 - DNA, 20 bp, synthetic construct
  source 1..20: mol_type = other DNA
gtctcactctgttgcctagg

SEQ ID NO: 284620 - DNA, 20 bp, synthetic construct
  source 1..20: mol_type = other DNA
agtctcactctgttgcctag

SEQ ID NO: 284621 - DNA, 20 bp, synthetic construct
  source 1..20: mol_type = other DNA
aagtctcactctgttgccta

SEQ ID NO: 284622 - DNA, 20 bp, synthetic construct
  source 1..20: mol_type = other DNA
aaagtctcactctgttgcct

SEQ ID NO: 284623 - DNA, 20 bp, synthetic construct
  source 1..20: mol_type = other DNA
caaagtctcactctgttgcc

SEQ ID NO: 284624 - DNA, 20 bp, synthetic construct
  source 1..20: mol_type = other DNA
acaaagtctcactctgttgc

SEQ ID NO: 284625 - DNA, 20 bp, synthetic construct
  source 1..20: mol_type = other DNA
gacaaagtctcactctgttg

SEQ ID NO: 284626 - DNA, 20 bp, synthetic construct
  source 1..20: mol_type = other DNA
agacaaagtctcactctgtt

SEQ ID NO: 284627 - DNA, 20 bp, synthetic construct
  source 1..20: mol_type = other DNA
gagacaaagtctcactctgt

SEQ ID NO: 284628 - DNA, 20 bp, synthetic construct
  source 1..20: mol_type = other DNA
tgagacaaagtctcactctg

SEQ ID NO: 284629 - DNA, 20 bp, synthetic construct
  source 1..20: mol_type = other DNA
ttgagacaaagtctcactct

SEQ ID NO: 284630 - DNA, 20 bp, synthetic construct
  source 1..20: mol_type = other DNA
tttgagacaaagtctcactc

SEQ ID NO: 284631 - DNA, 20 bp, synthetic construct
  source 1..20: mol_type = other DNA
ttttgagacaaagtctcact

SEQ ID NO: 284632 - DNA, 20 bp, synthetic construct
  source 1..20: mol_type = other DNA
tttttgagacaaagtctcac

SEQ ID NO: 284633 - DNA, 20 bp, synthetic construct
  source 1..20: mol_type = other DNA
ttttttgagacaaagtctca

SEQ ID NO: 284634 - DNA, 20 bp, synthetic construct
  source 1..20: mol_type = other DNA
gttttttgagacaaagtctc

SEQ ID NO: 284635 - DNA, 20 bp, synthetic construct
  source 1..20: mol_type = other DNA
tgttttttgagacaaagtct

SEQ ID NO: 284636 - DNA, 20 bp, synthetic construct
  source 1..20: mol_type = other DNA
ttgttttttgagacaaagtc

SEQ ID NO: 284637 - DNA, 20 bp, synthetic construct
  source 1..20: mol_type = other DNA
attgttttttgagacaaagt

SEQ ID NO: 284638 - DNA, 20 bp, synthetic construct
  source 1..20: mol_type = other DNA
gattgttttttgagacaaag

SEQ ID NO: 284639 - DNA, 20 bp, synthetic construct
  source 1..20: mol_type = other DNA
tgattgttttttgagacaaa

SEQ ID NO: 284640 - DNA, 20 bp, synthetic construct
  source 1..20: mol_type = other DNA
atgattgttttttgagacaa

SEQ ID NO: 284641 - DNA, 20 bp, synthetic construct
  source 1..20: mol_type = other DNA
tatgattgttttttgagaca

SEQ ID NO: 284642 - DNA, 20 bp, synthetic construct
  source 1..20: mol_type = other DNA
atatgattgttttttgagac

SEQ ID NO: 284643 - DNA, 20 bp, synthetic construct
  source 1..20: mol_type = other DNA
tatatgattgttttttgaga

SEQ ID NO: 284644 - DNA, 20 bp, synthetic construct
  source 1..20: mol_type = other DNA
ttatatgattgttttttgag

SEQ ID NO: 284645 - DNA, 20 bp, synthetic construct
  source 1..20: mol_type = other DNA
attatatgattgttttttga

SEQ ID NO: 284646 - DNA, 20 bp, synthetic construct
  source 1..20: mol_type = other DNA
tattatatgattgttttttg

SEQ ID NO: 284647 - DNA, 20 bp, synthetic construct
  source 1..20: mol_type = other DNA
ttattatatgattgtttttt

SEQ ID NO: 284648 - DNA, 20 bp, synthetic construct
  source 1..20: mol_type = other DNA
attattatatgattgttttt

SEQ ID NO: 284649 - DNA, 20 bp, synthetic construct
  source 1..20: mol_type = other DNA
aattattatatgattgtttt

SEQ ID NO: 284650 - DNA, 20 bp, synthetic construct
  source 1..20: mol_type = other DNA
aaattattatatgattgttt

SEQ ID NO: 284651 - DNA, 20 bp, synthetic construct
  source 1..20: mol_type = other DNA
aaaattattatatgattgtt

SEQ ID NO: 284652 - DNA, 20 bp, synthetic construct
  source 1..20: mol_type = other DNA
taaaattattatatgattgt

SEQ ID NO: 284653 - DNA, 20 bp, synthetic construct
  source 1..20: mol_type = other DNA
ttaaaattattatatgattg

SEQ ID NO: 284654 - DNA, 20 bp, synthetic construct
  source 1..20: mol_type = other DNA
tttaaaattattatatgatt

SEQ ID NO: 284655 - DNA, 20 bp, synthetic construct
  source 1..20: mol_type = other DNA
ttttaaaattattatatgat

SEQ ID NO: 284656 - DNA, 20 bp, synthetic construct
  source 1..20: mol_type = other DNA
attttaaaattattatatga

SEQ ID NO: 284657 - DNA, 20 bp, synthetic construct
  source 1..20: mol_type = other DNA
tattttaaaattattatatg

SEQ ID NO: 284658 - DNA, 20 bp, synthetic construct
  source 1..20: mol_type = other DNA
ttattttaaaattattatat

SEQ ID NO: 284659 - DNA, 20 bp, synthetic construct
  source 1..20: mol_type = other DNA
tttattttaaaattattata

SEQ ID NO: 284660 - DNA, 20 bp, synthetic construct
  source 1..20: mol_type = other DNA
atttattttaaaattattat

SEQ ID NO: 284661 - DNA, 20 bp, synthetic construct
  source 1..20: mol_type = other DNA
tatttattttaaaattatta

SEQ ID NO: 284662 - DNA, 20 bp, synthetic construct
  source 1..20: mol_type = other DNA
ctatttattttaaaattatt

SEQ ID NO: 284663 - DNA, 20 bp, synthetic construct
  source 1..20: mol_type = other DNA
tctatttattttaaaattat

SEQ ID NO: 284664 - DNA, 20 bp, synthetic construct
  source 1..20: mol_type = other DNA
atctatttattttaaaatta

SEQ ID NO: 284665 - DNA, 20 bp, synthetic construct
  source 1..20: mol_type = other DNA
aatctatttattttaaaatt

SEQ ID NO: 284666 - DNA, 20 bp, synthetic construct
  source 1..20: mol_type = other DNA
aaatctatttattttaaaat

SEQ ID NO: 284667 - DNA, 20 bp, synthetic construct
  source 1..20: mol_type = other DNA
caaatctatttattttaaaa

SEQ ID NO: 284668 - DNA, 20 bp, synthetic construct
  source 1..20: mol_type = other DNA
ccaaatctatttattttaaa

SEQ ID NO: 284669 - DNA, 20 bp, synthetic construct
  source 1..20: mol_type = other DNA
gccaaatctatttattttaa

SEQ ID NO: 284670 - DNA, 20 bp, synthetic construct
  source 1..20: mol_type = other DNA
agccaaatctatttatttta

SEQ ID NO: 284671 - DNA, 20 bp, synthetic construct
  source 1..20: mol_type = other DNA
aagccaaatctatttatttt

SEQ ID NO: 284672 - DNA, 20 bp, synthetic construct
  source 1..20: mol_type = other DNA
gaagccaaatctatttattt

SEQ ID NO: 284673 - DNA, 20 bp, synthetic construct
  source 1..20: mol_type = other DNA
ggaagccaaatctatttatt

SEQ ID NO: 284674 - DNA, 20 bp, synthetic construct
  source 1..20: mol_type = other DNA
aggaagccaaatctatttat

SEQ ID NO: 284675 - DNA, 20 bp, synthetic construct
  source 1..20: mol_type = other DNA
gaggaagccaaatctattta

SEQ ID NO: 284676 - DNA, 20 bp, synthetic construct
  source 1..20: mol_type = other DNA
agaggaagccaaatctattt

SEQ ID NO: 284677 - DNA, 20 bp, synthetic construct
  source 1..20: mol_type = other DNA
tagaggaagccaaatctatt

SEQ ID NO: 284678 - DNA, 20 bp, synthetic construct
  source 1..20: mol_type = other DNA
ttagaggaagccaaatctat

SEQ ID NO: 284679 - DNA, 20 bp, synthetic construct
  source 1..20: mol_type = other DNA
tttagaggaagccaaatcta

SEQ ID NO: 284680 - DNA, 20 bp, synthetic construct
  source 1..20: mol_type = other DNA
atttagaggaagccaaatct

SEQ ID NO: 284681 - DNA, 20 bp, synthetic construct
  source 1..20: mol_type = other DNA
catttagaggaagccaaatc

SEQ ID NO: 284682 - DNA, 20 bp, synthetic construct
  source 1..20: mol_type = other DNA
acatttagaggaagccaaat

SEQ ID NO: 284683 - DNA, 20 bp, synthetic construct
  source 1..20: mol_type = other DNA
gacatttagaggaagccaaa

SEQ ID NO: 284684 - DNA, 20 bp, synthetic construct
  source 1..20: mol_type = other DNA
ggacatttagaggaagccaa

SEQ ID NO: 284685 - DNA, 20 bp, synthetic construct
  source 1..20: mol_type = other DNA
gggacatttagaggaagcca

SEQ ID NO: 284686 - DNA, 20 bp, synthetic construct
  source 1..20: mol_type = other DNA
ggggacatttagaggaagcc

SEQ ID NO: 284687 - DNA, 20 bp, synthetic construct
  source 1..20: mol_type = other DNA
cggggacatttagaggaagc

SEQ ID NO: 284688 - DNA, 20 bp, synthetic construct
  source 1..20: mol_type = other DNA
ccggggacatttagaggaag

SEQ ID NO: 284689 - DNA, 20 bp, synthetic construct
  source 1..20: mol_type = other DNA
cccggggacatttagaggaa

SEQ ID NO: 284690 - DNA, 20 bp, synthetic construct
  source 1..20: mol_type = other DNA
ccccggggacatttagagga

SEQ ID NO: 284691 - DNA, 20 bp, synthetic construct
  source 1..20: mol_type = other DNA
tccccggggacatttagagg

SEQ ID NO: 284692 - DNA, 20 bp, synthetic construct
  source 1..20: mol_type = other DNA
gtccccggggacatttagag

SEQ ID NO: 284693 - DNA, 20 bp, synthetic construct
  source 1..20: mol_type = other DNA
agtccccggggacatttaga

SEQ ID NO: 284694 - DNA, 20 bp, synthetic construct
  source 1..20: mol_type = other DNA
gagtccccggggacatttag

SEQ ID NO: 284695 - DNA, 20 bp, synthetic construct
  source 1..20: mol_type = other DNA
ggagtccccggggacattta

SEQ ID NO: 284696 - DNA, 20 bp, synthetic construct
  source 1..20: mol_type = other DNA
cggagtccccggggacattt

SEQ ID NO: 284697 - DNA, 20 bp, synthetic construct
  source 1..20: mol_type = other DNA
acggagtccccggggacatt

SEQ ID NO: 284698 - DNA, 20 bp, synthetic construct
  source 1..20: mol_type = other DNA
cacggagtccccggggacat

SEQ ID NO: 284699 - DNA, 20 bp, synthetic construct
  source 1..20: mol_type = other DNA
gcacggagtccccggggaca

SEQ ID NO: 284700 - DNA, 20 bp, synthetic construct
  source 1..20: mol_type = other DNA
tgcacggagtccccggggac

SEQ ID NO: 284701 - DNA, 20 bp, synthetic construct
  source 1..20: mol_type = other DNA
atgcacggagtccccgggga

SEQ ID NO: 284702 - DNA, 20 bp, synthetic construct
  source 1..20: mol_type = other DNA
gatgcacggagtccccgggg

SEQ ID NO: 284703 - DNA, 20 bp, synthetic construct
  source 1..20: mol_type = other DNA
agatgcacggagtccccggg

SEQ ID NO: 284704 - DNA, 20 bp, synthetic construct
  source 1..20: mol_type = other DNA
aagatgcacggagtccccgg

SEQ ID NO: 284705 - DNA, 20 bp, synthetic construct
  source 1..20: mol_type = other DNA
gaagatgcacggagtccccg

SEQ ID NO: 284706 - DNA, 20 bp, synthetic construct
  source 1..20: mol_type = other DNA
agaagatgcacggagtcccc

SEQ ID NO: 284707 - DNA, 20 bp, synthetic construct
  source 1..20: mol_type = other DNA
cagaagatgcacggagtccc

SEQ ID NO: 284708 - DNA, 20 bp, synthetic construct
  source 1..20: mol_type = other DNA
acagaagatgcacggagtcc

SEQ ID NO: 284709 - DNA, 20 bp, synthetic construct
  source 1..20: mol_type = other DNA
cacagaagatgcacggagtc

SEQ ID NO: 284710 - DNA, 20 bp, synthetic construct
  source 1..20: mol_type = other DNA
ccacagaagatgcacggagt

SEQ ID NO: 284711 - DNA, 20 bp, synthetic construct
  source 1..20: mol_type = other DNA
tccacagaagatgcacggag

SEQ ID NO: 284712 - DNA, 20 bp, synthetic construct
  source 1..20: mol_type = other DNA
ctccacagaagatgcacgga

SEQ ID NO: 284713 - DNA, 20 bp, synthetic construct
  source 1..20: mol_type = other DNA
actccacagaagatgcacgg

SEQ ID NO: 284714 - DNA, 20 bp, synthetic construct
  source 1..20: mol_type = other DNA
cactccacagaagatgcacg

SEQ ID NO: 284715 - DNA, 20 bp, synthetic construct
  source 1..20: mol_type = other DNA
acactccacagaagatgcac

SEQ ID NO: 284716 - DNA, 20 bp, synthetic construct
  source 1..20: mol_type = other DNA
gacactccacagaagatgca

SEQ ID NO: 284717 - DNA, 20 bp, synthetic construct
  source 1..20: mol_type = other DNA
agacactccacagaagatgc

SEQ ID NO: 284718 - DNA, 20 bp, synthetic construct
  source 1..20: mol_type = other DNA
gagacactccacagaagatg

SEQ ID NO: 284719 - DNA, 20 bp, synthetic construct
  source 1..20: mol_type = other DNA
ggagacactccacagaagat

SEQ ID NO: 284720 - DNA, 20 bp, synthetic construct
  source 1..20: mol_type = other DNA
cggagacactccacagaaga

SEQ ID NO: 284721 - DNA, 20 bp, synthetic construct
  source 1..20: mol_type = other DNA
acggagacactccacagaag

SEQ ID NO: 284722 - DNA, 20 bp, synthetic construct
  source 1..20: mol_type = other DNA
cacggagacactccacagaa

SEQ ID NO: 284723 - DNA, 20 bp, synthetic construct
  source 1..20: mol_type = other DNA
tcacggagacactccacaga

SEQ ID NO: 284724 - DNA, 20 bp, synthetic construct
  source 1..20: mol_type = other DNA
ctcacggagacactccacag

SEQ ID NO: 284725 - DNA, 20 bp, synthetic construct
  source 1..20: mol_type = other DNA
tctcacggagacactccaca

SEQ ID NO: 284726 - DNA, 20 bp, synthetic construct
  source 1..20: mol_type = other DNA
atctcacggagacactccac

SEQ ID NO: 284727 - DNA, 20 bp, synthetic construct
  source 1..20: mol_type = other DNA
aatctcacggagacactcca

SEQ ID NO: 284728 - DNA, 20 bp, synthetic construct
  source 1..20: mol_type = other DNA
gaatctcacggagacactcc

SEQ ID NO: 284729 - DNA, 20 bp, synthetic construct
  source 1..20: mol_type = other DNA
cgaatctcacggagacactc

SEQ ID NO: 284730 - DNA, 20 bp, synthetic construct
  source 1..20: mol_type = other DNA
ccgaatctcacggagacact

SEQ ID NO: 284731 - DNA, 20 bp, synthetic construct
  source 1..20: mol_type = other DNA
cccgaatctcacggagacac

SEQ ID NO: 284732 - DNA, 20 bp, synthetic construct
  source 1..20: mol_type = other DNA
tcccgaatctcacggagaca

SEQ ID NO: 284733 - DNA, 20 bp, synthetic construct
  source 1..20: mol_type = other DNA
gtcccgaatctcacggagac

SEQ ID NO: 284734 - DNA, 20 bp, synthetic construct
  source 1..20: mol_type = other DNA
agtcccgaatctcacggaga

SEQ ID NO: 284735 - DNA, 20 bp, synthetic construct
  source 1..20: mol_type = other DNA
gagtcccgaatctcacggag

SEQ ID NO: 284736 - DNA, 20 bp, synthetic construct
  source 1..20: mol_type = other DNA
tgagtcccgaatctcacgga

SEQ ID NO: 284737 - DNA, 20 bp, synthetic construct
  source 1..20: mol_type = other DNA
ctgagtcccgaatctcacgg

SEQ ID NO: 284738 - DNA, 20 bp, synthetic construct
  source 1..20: mol_type = other DNA
tctgagtcccgaatctcacg

SEQ ID NO: 284739 - DNA, 20 bp, synthetic construct
  source 1..20: mol_type = other DNA
atctgagtcccgaatctcac

SEQ ID NO: 284740 - DNA, 20 bp, synthetic construct
  source 1..20: mol_type = other DNA
gatctgagtcccgaatctca

SEQ ID NO: 284741 - DNA, 20 bp, synthetic construct
  source 1..20: mol_type = other DNA
ggatctgagtcccgaatctc

SEQ ID NO: 284742 - DNA, 20 bp, synthetic construct
  source 1..20: mol_type = other DNA
aggatctgagtcccgaatct

SEQ ID NO: 284743 - DNA, 20 bp, synthetic construct
  source 1..20: mol_type = other DNA
gaggatctgagtcccgaatc

SEQ ID NO: 284744 - DNA, 20 bp, synthetic construct
  source 1..20: mol_type = other DNA
tgaggatctgagtcccgaat

SEQ ID NO: 284745 - DNA, 20 bp, synthetic construct
  source 1..20: mol_type = other DNA
ttgaggatctgagtcccgaa

SEQ ID NO: 284746 - DNA, 20 bp, synthetic construct
  source 1..20: mol_type = other DNA
cttgaggatctgagtcccga

SEQ ID NO: 284747 - DNA, 20 bp, synthetic construct
  source 1..20: mol_type = other DNA
acttgaggatctgagtcccg

SEQ ID NO: 284748 - DNA, 20 bp, synthetic construct
  source 1..20: mol_type = other DNA
cacttgaggatctgagtccc

SEQ ID NO: 284749 - DNA, 20 bp, synthetic construct
  source 1..20: mol_type = other DNA
gcacttgaggatctgagtcc

SEQ ID NO: 284750 - DNA, 20 bp, synthetic construct
  source 1..20: mol_type = other DNA
tgcacttgaggatctgagtc

SEQ ID NO: 284751 - DNA, 20 bp, synthetic construct
  source 1..20: mol_type = other DNA
ttgcacttgaggatctgagt

SEQ ID NO: 284752 - DNA, 20 bp, synthetic construct
  source 1..20: mol_type = other DNA
gttgcacttgaggatctgag

SEQ ID NO: 284753 - DNA, 20 bp, synthetic construct
  source 1..20: mol_type = other DNA
agttgcacttgaggatctga

SEQ ID NO: 284754 - DNA, 20 bp, synthetic construct
  source 1..20: mol_type = other DNA
cagttgcacttgaggatctg

SEQ ID NO: 284755 - DNA, 20 bp, synthetic construct
  source 1..20: mol_type = other DNA
tcagttgcacttgaggatct

SEQ ID NO: 284756 - DNA, 20 bp, synthetic construct
  source 1..20: mol_type = other DNA
gtcagttgcacttgaggatc

SEQ ID NO: 284757 - DNA, 20 bp, synthetic construct
  source 1..20: mol_type = other DNA
ggtcagttgcacttgaggat

SEQ ID NO: 284758 - DNA, 20 bp, synthetic construct
  source 1..20: mol_type = other DNA
gggtcagttgcacttgagga

SEQ ID NO: 284759 - DNA, 20 bp, synthetic construct
  source 1..20: mol_type = other DNA
tgggtcagttgcacttgagg

SEQ ID NO: 284760 - DNA, 20 bp, synthetic construct
  source 1..20: mol_type = other DNA
gtgggtcagttgcacttgag

SEQ ID NO: 284761 - DNA, 20 bp, synthetic construct
  source 1..20: mol_type = other DNA
ggtgggtcagttgcacttga

SEQ ID NO: 284762 - DNA, 20 bp, synthetic construct
  source 1..20: mol_type = other DNA
gggtgggtcagttgcacttg

SEQ ID NO: 284763 - DNA, 20 bp, synthetic construct
  source 1..20: mol_type = other DNA
cgggtgggtcagttgcactt

SEQ ID NO: 284764 - DNA, 20 bp, synthetic construct
  source 1..20: mol_type = other DNA
tcgggtgggtcagttgcact

SEQ ID NO: 284765 - DNA, 20 bp, synthetic construct
  source 1..20: mol_type = other DNA
atcgggtgggtcagttgcac

SEQ ID NO: 284766 - DNA, 20 bp, synthetic construct
  source 1..20: mol_type = other DNA
tatcgggtgggtcagttgca

SEQ ID NO: 284767 - DNA, 20 bp, synthetic construct
  source 1..20: mol_type = other DNA
ttatcgggtgggtcagttgc

SEQ ID NO: 284768 - DNA, 20 bp, synthetic construct
  source 1..20: mol_type = other DNA
cttatcgggtgggtcagttg

SEQ ID NO: 284769 - DNA, 20 bp, synthetic construct
  source 1..20: mol_type = other DNA
gcttatcgggtgggtcagtt

SEQ ID NO: 284770 - DNA, 20 bp, synthetic construct
  source 1..20: mol_type = other DNA
agcttatcgggtgggtcagt

SEQ ID NO: 284771 - DNA, 20 bp, synthetic construct
  source 1..20: mol_type = other DNA
cagcttatcgggtgggtcag

SEQ ID NO: 284772 - DNA, 20 bp, synthetic construct
  source 1..20: mol_type = other DNA
tcagcttatcgggtgggtca

SEQ ID NO: 284773 - DNA, 20 bp, synthetic construct
  source 1..20: mol_type = other DNA
ctcagcttatcgggtgggtc

SEQ ID NO: 284774 - DNA, 20 bp, synthetic construct
  source 1..20: mol_type = other DNA
cctcagcttatcgggtgggt

SEQ ID NO: 284775 - DNA, 20 bp, synthetic construct
  source 1..20: mol_type = other DNA
gcctcagcttatcgggtggg

SEQ ID NO: 284776 - DNA, 20 bp, synthetic construct
  source 1..20: mol_type = other DNA
agcctcagcttatcgggtgg

SEQ ID NO: 284777 - DNA, 20 bp, synthetic construct
  source 1..20: mol_type = other DNA
aagcctcagcttatcgggtg

SEQ ID NO: 284778 - DNA, 20 bp, synthetic construct
  source 1..20: mol_type = other DNA
gaagcctcagcttatcgggt

SEQ ID NO: 284779 - DNA, 20 bp, synthetic construct
  source 1..20: mol_type = other DNA
tgaagcctcagcttatcggg

SEQ ID NO: 284780 - DNA, 20 bp, synthetic construct
  source 1..20: mol_type = other DNA
atgaagcctcagcttatcgg

SEQ ID NO: 284781 - DNA, 20 bp, synthetic construct
  source 1..20: mol_type = other DNA
gatgaagcctcagcttatcg

SEQ ID NO: 284782 - DNA, 20 bp, synthetic construct
  source 1..20: mol_type = other DNA
tgatgaagcctcagcttatc

SEQ ID NO: 284783 - DNA, 20 bp, synthetic construct
  source 1..20: mol_type = other DNA
atgatgaagcctcagcttat

SEQ ID NO: 284784 - DNA, 20 bp, synthetic construct
  source 1..20: mol_type = other DNA
gatgatgaagcctcagctta

SEQ ID NO: 284785 - DNA, 20 bp, synthetic construct
  source 1..20: mol_type = other DNA
ggatgatgaagcctcagctt

SEQ ID NO: 284786 - DNA, 20 bp, synthetic construct
  source 1..20: mol_type = other DNA
gggatgatgaagcctcagct

SEQ ID NO: 284787 - DNA, 20 bp, synthetic construct
  source 1..20: mol_type = other DNA
ggggatgatgaagcctcagc

SEQ ID NO: 284788 - DNA, 20 bp, synthetic construct
  source 1..20: mol_type = other DNA
aggggatgatgaagcctcag

SEQ ID NO: 284789 - DNA, 20 bp, synthetic construct
  source 1..20: mol_type = other DNA
caggggatgatgaagcctca

SEQ ID NO: 284790 - DNA, 20 bp, synthetic construct
  source 1..20: mol_type = other DNA
ccaggggatgatgaagcctc

SEQ ID NO: 284791 - DNA, 20 bp, synthetic construct
  source 1..20: mol_type = other DNA
gccaggggatgatgaagcct

SEQ ID NO: 284792 - DNA, 20 bp, synthetic construct
  source 1..20: mol_type = other DNA
ggccaggggatgatgaagcc

SEQ ID NO: 284793 - DNA, 20 bp, synthetic construct
  source 1..20: mol_type = other DNA
cggccaggggatgatgaagc

SEQ ID NO: 284794 - DNA, 20 bp, synthetic construct
  source 1..20: mol_type = other DNA
ccggccaggggatgatgaag

SEQ ID NO: 284795 - DNA, 20 bp, synthetic construct
  source 1..20: mol_type = other DNA
accggccaggggatgatgaa

SEQ ID NO: 284796 - DNA, 20 bp, synthetic construct
  source 1..20: mol_type = other DNA
gaccggccaggggatgatga

SEQ ID NO: 284797 - DNA, 20 bp, synthetic construct
  source 1..20: mol_type = other DNA
agaccggccaggggatgatg

SEQ ID NO: 284798 - DNA, 20 bp, synthetic construct
  source 1..20: mol_type = other DNA
tagaccggccaggggatgat

SEQ ID NO: 284799 - DNA, 20 bp, synthetic construct
  source 1..20: mol_type = other DNA
atagaccggccaggggatga

SEQ ID NO: 284800 - DNA, 20 bp, synthetic construct
  source 1..20: mol_type = other DNA
catagaccggccaggggatg

SEQ ID NO: 284801 - DNA, 20 bp, synthetic construct
  source 1..20: mol_type = other DNA
acatagaccggccaggggat

SEQ ID NO: 284802 - DNA, 20 bp, synthetic construct
  source 1..20: mol_type = other DNA
gacatagaccggccagggga

SEQ ID NO: 284803 - DNA, 20 bp, synthetic construct
  source 1..20: mol_type = other DNA
cgacatagaccggccagggg

SEQ ID NO: 284804 - DNA, 20 bp, synthetic construct
  source 1..20: mol_type = other DNA
tcgacatagaccggccaggg

SEQ ID NO: 284805 - DNA, 20 bp, synthetic construct
  source 1..20: mol_type = other DNA
gtcgacatagaccggccagg

SEQ ID NO: 284806 - DNA, 20 bp, synthetic construct
  source 1..20: mol_type = other DNA
agtcgacatagaccggccag

SEQ ID NO: 284807 - DNA, 20 bp, synthetic construct
  source 1..20: mol_type = other DNA
cagtcgacatagaccggcca

SEQ ID NO: 284808 - DNA, 20 bp, synthetic construct
  source 1..20: mol_type = other DNA
ccagtcgacatagaccggcc

SEQ ID NO: 284809 - DNA, 20 bp, synthetic construct
  source 1..20: mol_type = other DNA
cccagtcgacatagaccggc

SEQ ID NO: 284810 - DNA, 20 bp, synthetic construct
  source 1..20: mol_type = other DNA
gcccagtcgacatagaccgg

SEQ ID NO: 284811 - DNA, 20 bp, synthetic construct
  source 1..20: mol_type = other DNA
tgcccagtcgacatagaccg

SEQ ID NO: 284812 - DNA, 20 bp, synthetic construct
  source 1..20: mol_type = other DNA
gtgcccagtcgacatagacc

SEQ ID NO: 284813 - DNA, 20 bp, synthetic construct
  source 1..20: mol_type = other DNA
ggtgcccagtcgacatagac

SEQ ID NO: 284814 - DNA, 20 bp, synthetic construct
  source 1..20: mol_type = other DNA
gggtgcccagtcgacataga

SEQ ID NO: 284815 - DNA, 20 bp, synthetic construct
  source 1..20: mol_type = other DNA
cgggtgcccagtcgacatag

SEQ ID NO: 284816 - DNA, 20 bp, synthetic construct
  source 1..20: mol_type = other DNA
tcgggtgcccagtcgacata

SEQ ID NO: 284817 - DNA, 20 bp, synthetic construct
  source 1..20: mol_type = other DNA
ctcgggtgcccagtcgacat

SEQ ID NO: 284818 - DNA, 20 bp, synthetic construct
  source 1..20: mol_type = other DNA
cctcgggtgcccagtcgaca

SEQ ID NO: 284819 - DNA, 20 bp, synthetic construct
  source 1..20: mol_type = other DNA
gcctcgggtgcccagtcgac

SEQ ID NO: 284820 - DNA, 20 bp, synthetic construct
  source 1..20: mol_type = other DNA
agcctcgggtgcccagtcga

SEQ ID NO: 284821 - DNA, 20 bp, synthetic construct
  source 1..20: mol_type = other DNA
gagcctcgggtgcccagtcg

SEQ ID NO: 284822 - DNA, 20 bp, synthetic construct
  source 1..20: mol_type = other DNA
ggagcctcgggtgcccagtc

SEQ ID NO: 284823 - DNA, 20 bp, synthetic construct
  source 1..20: mol_type = other DNA
aggagcctcgggtgcccagt

SEQ ID NO: 284824 - DNA, 20 bp, synthetic construct
  source 1..20: mol_type = other DNA
gaggagcctcgggtgcccag

SEQ ID NO: 284825 - DNA, 20 bp, synthetic construct
  source 1..20: mol_type = other DNA
agaggagcctcgggtgccca

SEQ ID NO: 284826 - DNA, 20 bp, synthetic construct
  source 1..20: mol_type = other DNA
gagaggagcctcgggtgccc

SEQ ID NO: 284827 - DNA, 20 bp, synthetic construct
  source 1..20: mol_type = other DNA
ggagaggagcctcgggtgcc

SEQ ID NO: 284828 - DNA, 20 bp, synthetic construct
  source 1..20: mol_type = other DNA
gggagaggagcctcgggtgc

SEQ ID NO: 284829 - DNA, 20 bp, synthetic construct
  source 1..20: mol_type = other DNA
tgggagaggagcctcgggtg

SEQ ID NO: 284830 - DNA, 20 bp, synthetic construct
  source 1..20: mol_type = other DNA
gtgggagaggagcctcgggt

SEQ ID NO: 284831 - DNA, 20 bp, synthetic construct
  source 1..20: mol_type = other DNA
ggtgggagaggagcctcggg

SEQ ID NO: 284832 - DNA, 20 bp, synthetic construct
  source 1..20: mol_type = other DNA
tggtgggagaggagcctcgg

SEQ ID NO: 284833 - DNA, 20 bp, synthetic construct
  source 1..20: mol_type = other DNA
ctggtgggagaggagcctcg

SEQ ID NO: 284834 - DNA, 20 bp, synthetic construct
  source 1..20: mol_type = other DNA
gctggtgggagaggagcctc

SEQ ID NO: 284835 - DNA, 20 bp, synthetic construct
  source 1..20: mol_type = other DNA
agctggtgggagaggagcct

SEQ ID NO: 284836 - DNA, 20 bp, synthetic construct
  source 1..20: mol_type = other DNA
gagctggtgggagaggagcc

SEQ ID NO: 284837 - DNA, 20 bp, synthetic construct
  source 1..20: mol_type = other DNA
agagctggtgggagaggagc

SEQ ID NO: 284838 - DNA, 20 bp, synthetic construct
  source 1..20: mol_type = other DNA
gagagctggtgggagaggag

SEQ ID NO: 284839 - DNA, 20 bp, synthetic construct
  source 1..20: mol_type = other DNA
agagagctggtgggagagga

SEQ ID NO: 284840 - DNA, 20 bp, synthetic construct
  source 1..20: mol_type = other DNA
aagagagctggtgggagagg

SEQ ID NO: 284841 - DNA, 20 bp, synthetic construct
  source 1..20: mol_type = other DNA
caagagagctggtgggagag

SEQ ID NO: 284842 - DNA, 20 bp, synthetic construct
  source 1..20: mol_type = other DNA
ccaagagagctggtgggaga

SEQ ID NO: 284843 - DNA, 20 bp, synthetic construct
  source 1..20: mol_type = other DNA
accaagagagctggtgggag

SEQ ID NO: 284844 - DNA, 20 bp, synthetic construct
  source 1..20: mol_type = other DNA
gaccaagagagctggtggga

SEQ ID NO: 284845 - DNA, 20 bp, synthetic construct
  source 1..20: mol_type = other DNA
tgaccaagagagctggtggg

SEQ ID NO: 284846 - DNA, 20 bp, synthetic construct
  source 1..20: mol_type = other DNA
ctgaccaagagagctggtgg

SEQ ID NO: 284847 - DNA, 20 bp, synthetic construct
  source 1..20: mol_type = other DNA
gctgaccaagagagctggtg

SEQ ID NO: 284848 - DNA, 20 bp, synthetic construct
  source 1..20: mol_type = other DNA
agctgaccaagagagctggt

SEQ ID NO: 284849 - DNA, 20 bp, synthetic construct
  source 1..20: mol_type = other DNA
cagctgaccaagagagctgg

SEQ ID NO: 284850 - DNA, 20 bp, synthetic construct
  source 1..20: mol_type = other DNA
tcagctgaccaagagagctg

SEQ ID NO: 284851 - DNA, 20 bp, synthetic construct
  source 1..20: mol_type = other DNA
ttcagctgaccaagagagct

SEQ ID NO: 284852 - DNA, 20 bp, synthetic construct
  source 1..20: mol_type = other DNA
tttcagctgaccaagagagc

SEQ ID NO: 284853 - DNA, 20 bp, synthetic construct
  source 1..20: mol_type = other DNA
ctttcagctgaccaagagag

SEQ ID NO: 284854 - DNA, 20 bp, synthetic construct
  source 1..20: mol_type = other DNA
gctttcagctgaccaagaga

SEQ ID NO: 284855 - DNA, 20 bp, synthetic construct
  source 1..20: mol_type = other DNA
tgctttcagctgaccaagag

SEQ ID NO: 284856 - DNA, 20 bp, synthetic construct
  source 1..20: mol_type = other DNA
ttgctttcagctgaccaaga

SEQ ID NO: 284857 - DNA, 20 bp, synthetic construct
  source 1..20: mol_type = other DNA
tttgctttcagctgaccaag

SEQ ID NO: 284858 - DNA, 20 bp, synthetic construct
  source 1..20: mol_type = other DNA
gtttgctttcagctgaccaa

SEQ ID NO: 284859 - DNA, 20 bp, synthetic construct
  source 1..20: mol_type = other DNA
agtttgctttcagctgacca

SEQ ID NO: 284860 - DNA, 20 bp, synthetic construct
  source 1..20: mol_type = other DNA
cagtttgctttcagctgacc

SEQ ID NO: 284861 - DNA, 20 bp, synthetic construct
  source 1..20: mol_type = other DNA
acagtttgctttcagctgac

SEQ ID NO: 284862 - DNA, 20 bp, synthetic construct
  source 1..20: mol_type = other DNA
aacagtttgctttcagctga

SEQ ID NO: 284863 - DNA, 20 bp, synthetic construct
  source 1..20: mol_type = other DNA
taacagtttgctttcagctg

SEQ ID NO: 284864 - DNA, 20 bp, synthetic construct
  source 1..20: mol_type = other DNA
ttaacagtttgctttcagct

SEQ ID NO: 284865 - DNA, 20 bp, synthetic construct
  source 1..20: mol_type = other DNA
gttaacagtttgctttcagc

SEQ ID NO: 284866 - DNA, 20 bp, synthetic construct
  source 1..20: mol_type = other DNA
tgttaacagtttgctttcag

SEQ ID NO: 284867 - DNA, 20 bp, synthetic construct
  source 1..20: mol_type = other DNA
gtgttaacagtttgctttca

SEQ ID NO: 284868 - DNA, 20 bp, synthetic construct
  source 1..20: mol_type = other DNA
ggtgttaacagtttgctttc

SEQ ID NO: 284869 - DNA, 20 bp, synthetic construct
  source 1..20: mol_type = other DNA
gggtgttaacagtttgcttt

SEQ ID NO: 284870 - DNA, 20 bp, synthetic construct
  source 1..20: mol_type = other DNA
agggtgttaacagtttgctt

SEQ ID NO: 284871 - DNA, 20 bp, synthetic construct
  source 1..20: mol_type = other DNA
cagggtgttaacagtttgct

SEQ ID NO: 284872 - DNA, 20 bp, synthetic construct
  source 1..20: mol_type = other DNA
ccagggtgttaacagtttgc

SEQ ID NO: 284873 - DNA, 20 bp, synthetic construct
  source 1..20: mol_type = other DNA
cccagggtgttaacagtttg

SEQ ID NO: 284874 - DNA, 20 bp, synthetic construct
  source 1..20: mol_type = other DNA
ccccagggtgttaacagttt

SEQ ID NO: 284875 - DNA, 20 bp, synthetic construct
  source 1..20: mol_type = other DNA
tccccagggtgttaacagtt

SEQ ID NO: 284876 - DNA, 20 bp, synthetic construct
  source 1..20: mol_type = other DNA
ctccccagggtgttaacagt

SEQ ID NO: 284877 - DNA, 20 bp, synthetic construct
  source 1..20: mol_type = other DNA
gctccccagggtgttaacag

SEQ ID NO: 284878 - DNA, 20 bp, synthetic construct
  source 1..20: mol_type = other DNA
agctccccagggtgttaaca

SEQ ID NO: 284879 - DNA, 20 bp, synthetic construct
  source 1..20: mol_type = other DNA
cagctccccagggtgttaac

SEQ ID NO: 284880 - DNA, 20 bp, synthetic construct
  source 1..20: mol_type = other DNA
ccagctccccagggtgttaa

SEQ ID NO: 284881 - DNA, 20 bp, synthetic construct
  source 1..20: mol_type = other DNA
tccagctccccagggtgtta

SEQ ID NO: 284882 - DNA, 20 bp, synthetic construct
  source 1..20: mol_type = other DNA
gtccagctccccagggtgtt

SEQ ID NO: 284883 - DNA, 20 bp, synthetic construct
  source 1..20: mol_type = other DNA
cgtccagctccccagggtgt

SEQ ID NO: 284884 - DNA, 20 bp, synthetic construct
  source 1..20: mol_type = other DNA
acgtccagctccccagggtg

SEQ ID NO: 284885 - DNA, 20 bp, synthetic construct
  source 1..20: mol_type = other DNA
tacgtccagctccccagggt

SEQ ID NO: 284886 - DNA, 20 bp, synthetic construct
  source 1..20: mol_type = other DNA
atacgtccagctccccaggg

SEQ ID NO: 284887 - DNA, 20 bp, synthetic construct
  source 1..20: mol_type = other DNA
catacgtccagctccccagg

SEQ ID NO: 284888 - DNA, 20 bp, synthetic construct
  source 1..20: mol_type = other DNA
tcatacgtccagctccccag

SEQ ID NO: 284889 - DNA, 20 bp, synthetic construct
  source 1..20: mol_type = other DNA
ctcatacgtccagctcccca

SEQ ID NO: 284890 - DNA, 20 bp, synthetic construct
  source 1..20: mol_type = other DNA
tctcatacgtccagctcccc

SEQ ID NO: 284891 - DNA, 20 bp, synthetic construct
  source 1..20: mol_type = other DNA
gtctcatacgtccagctccc

SEQ ID NO: 284892 - DNA, 20 bp, synthetic construct
  source 1..20: mol_type = other DNA
ggtctcatacgtccagctcc

SEQ ID NO: 284893 - DNA, 20 bp, synthetic construct
  source 1..20: mol_type = other DNA
gggtctcatacgtccagctc

SEQ ID NO: 284894 - DNA, 20 bp, synthetic construct
  source 1..20: mol_type = other DNA
agggtctcatacgtccagct

SEQ ID NO: 284895 - DNA, 20 bp, synthetic construct
  source 1..20: mol_type = other DNA
aagggtctcatacgtccagc

SEQ ID NO: 284896 - DNA, 20 bp, synthetic construct
  source 1..20: mol_type = other DNA
caagggtctcatacgtccag

SEQ ID NO: 284897 - DNA, 20 bp, synthetic construct
  source 1..20: mol_type = other DNA
ccaagggtctcatacgtcca

SEQ ID NO: 284898 - DNA, 20 bp, synthetic construct
  source 1..20: mol_type = other DNA
cccaagggtctcatacgtcc

SEQ ID NO: 284899 - DNA, 20 bp, synthetic construct
  source 1..20: mol_type = other DNA
ccccaagggtctcatacgtc

SEQ ID NO: 284900 - DNA, 20 bp, synthetic construct
  source 1..20: mol_type = other DNA
accccaagggtctcatacgt

SEQ ID NO: 284901 - DNA, 20 bp, synthetic construct
  source 1..20: mol_type = other DNA
caccccaagggtctcatacg

SEQ ID NO: 284902 - DNA, 20 bp, synthetic construct
  source 1..20: mol_type = other DNA
ccaccccaagggtctcatac

SEQ ID NO: 284903 - DNA, 20 bp, synthetic construct
  source 1..20: mol_type = other DNA
cccaccccaagggtctcata

SEQ ID NO: 284904 - DNA, 20 bp, synthetic construct
  source 1..20: mol_type = other DNA
tcccaccccaagggtctcat

SEQ ID NO: 284905 - DNA, 20 bp, synthetic construct
  source 1..20: mol_type = other DNA
ctcccaccccaagggtctca

SEQ ID NO: 284906 - DNA, 20 bp, synthetic construct
  source 1..20: mol_type = other DNA
cctcccaccccaagggtctc

SEQ ID NO: 284907 - DNA, 20 bp, synthetic construct
  source 1..20: mol_type = other DNA
gcctcccaccccaagggtct

SEQ ID NO: 284908 - DNA, 20 bp, synthetic construct
  source 1..20: mol_type = other DNA
cgcctcccaccccaagggtc

SEQ ID NO: 284909 - DNA, 20 bp, synthetic construct
  source 1..20: mol_type = other DNA
acgcctcccaccccaagggt

SEQ ID NO: 284910 - DNA, 20 bp, synthetic construct
  source 1..20: mol_type = other DNA
aacgcctcccaccccaaggg

SEQ ID NO: 284911 - DNA, 20 bp, synthetic construct
  source 1..20: mol_type = other DNA
caacgcctcccaccccaagg

SEQ ID NO: 284912 - DNA, 20 bp, synthetic construct
  source 1..20: mol_type = other DNA
tcaacgcctcccaccccaag

SEQ ID NO: 284913 - DNA, 20 bp, synthetic construct
  source 1..20: mol_type = other DNA
atcaacgcctcccaccccaa

SEQ ID NO: 284914 - DNA, 20 bp, synthetic construct
  source 1..20: mol_type = other DNA
aatcaacgcctcccacccca

SEQ ID NO: 284915 - DNA, 20 bp, synthetic construct
  source 1..20: mol_type = other DNA
aaatcaacgcctcccacccc

SEQ ID NO: 284916 - DNA, 20 bp, synthetic construct
  source 1..20: mol_type = other DNA
aaaatcaacgcctcccaccc

SEQ ID NO: 284917 - DNA, 20 bp, synthetic construct
  source 1..20: mol_type = other DNA
aaaaatcaacgcctcccacc

SEQ ID NO: 284918 - DNA, 20 bp, synthetic construct
  source 1..20: mol_type = other DNA
caaaaatcaacgcctcccac

SEQ ID NO: 284919 - DNA, 20 bp, synthetic construct
  source 1..20: mol_type = other DNA
tcaaaaatcaacgcctccca

SEQ ID NO: 284920 - DNA, 20 bp, synthetic construct
  source 1..20: mol_type = other DNA
ctcaaaaatcaacgcctccc

SEQ ID NO: 284921 - DNA, 20 bp, synthetic construct
  source 1..20: mol_type = other DNA
tctcaaaaatcaacgcctcc

SEQ ID NO: 284922 - DNA, 20 bp, synthetic construct
  source 1..20: mol_type = other DNA
ctctcaaaaatcaacgcctc

SEQ ID NO: 284923 - DNA, 20 bp, synthetic construct
  source 1..20: mol_type = other DNA
gctctcaaaaatcaacgcct

SEQ ID NO: 284924 - DNA, 20 bp, synthetic construct
  source 1..20: mol_type = other DNA
tgctctcaaaaatcaacgcc

SEQ ID NO: 284925 - DNA, 20 bp, synthetic construct
  source 1..20: mol_type = other DNA
ttgctctcaaaaatcaacgc

SEQ ID NO: 284926 - DNA, 20 bp, synthetic construct
  source 1..20: mol_type = other DNA
attgctctcaaaaatcaacg

SEQ ID NO: 284927 - DNA, 20 bp, synthetic construct
  source 1..20: mol_type = other DNA
gattgctctcaaaaatcaac

SEQ ID NO: 284928 - DNA, 20 bp, synthetic construct
  source 1..20: mol_type = other DNA
tgattgctctcaaaaatcaa

SEQ ID NO: 284929 - DNA, 20 bp, synthetic construct
  source 1..20: mol_type = other DNA
gtgattgctctcaaaaatca

SEQ ID NO: 284930 - DNA, 20 bp, synthetic construct
  source 1..20: mol_type = other DNA
ggtgattgctctcaaaaatc

SEQ ID NO: 284931 - DNA, 20 bp, synthetic construct
  source 1..20: mol_type = other DNA
aggtgattgctctcaaaaat

SEQ ID NO: 284932 - DNA, 20 bp, synthetic construct
  source 1..20: mol_type = other DNA
caggtgattgctctcaaaaa

SEQ ID NO: 284933 - DNA, 20 bp, synthetic construct
  source 1..20: mol_type = other DNA
ccaggtgattgctctcaaaa

SEQ ID NO: 284934 - DNA, 20 bp, synthetic construct
  source 1..20: mol_type = other DNA
gccaggtgattgctctcaaa

SEQ ID NO: 284935 - DNA, 20 bp, synthetic construct
  source 1..20: mol_type = other DNA
ggccaggtgattgctctcaa

SEQ ID NO: 284936 - DNA, 20 bp, synthetic construct
  source 1..20: mol_type = other DNA
gggccaggtgattgctctca

SEQ ID NO: 284937 - DNA, 20 bp, synthetic construct
  source 1..20: mol_type = other DNA
agggccaggtgattgctctc

SEQ ID NO: 284938 - DNA, 20 bp, synthetic construct
  source 1..20: mol_type = other DNA
cagggccaggtgattgctct

SEQ ID NO: 284939 - DNA, 20 bp, synthetic construct
  source 1..20: mol_type = other DNA
ccagggccaggtgattgctc

SEQ ID NO: 284940 - DNA, 20 bp, synthetic construct
  source 1..20: mol_type = other DNA
gccagggccaggtgattgct

SEQ ID NO: 284941 - DNA, 20 bp, synthetic construct
  source 1..20: mol_type = other DNA
agccagggccaggtgattgc

SEQ ID NO: 284942 - DNA, 20 bp, synthetic construct
  source 1..20: mol_type = other DNA
cagccagggccaggtgattg

SEQ ID NO: 284943 - DNA, 20 bp, synthetic construct
  source 1..20: mol_type = other DNA
ccagccagggccaggtgatt

SEQ ID NO: 284944 - DNA, 20 bp, synthetic construct
  source 1..20: mol_type = other DNA
gccagccagggccaggtgat

SEQ ID NO: 284945 - DNA, 20 bp, synthetic construct
  source 1..20: mol_type = other DNA
tgccagccagggccaggtga

SEQ ID NO: 284946 - DNA, 20 bp, synthetic construct
  source 1..20: mol_type = other DNA
ctgccagccagggccaggtg

SEQ ID NO: 284947 - DNA, 20 bp, synthetic construct
  source 1..20: mol_type = other DNA
actgccagccagggccaggt

SEQ ID NO: 284948 - DNA, 20 bp, synthetic construct
  source 1..20: mol_type = other DNA
tactgccagccagggccagg

SEQ ID NO: 284949 - DNA, 20 bp, synthetic construct
  source 1..20: mol_type = other DNA
gtactgccagccagggccag

SEQ ID NO: 284950 - DNA, 20 bp, synthetic construct
  source 1..20: mol_type = other DNA
ggtactgccagccagggcca

SEQ ID NO: 284951 - DNA, 20 bp, synthetic construct
  source 1..20: mol_type = other DNA
cggtactgccagccagggcc

SEQ ID NO: 284952 - DNA, 20 bp, synthetic construct
  source 1..20: mol_type = other DNA
ccggtactgccagccagggc

SEQ ID NO: 284953 - DNA, 20 bp, synthetic construct
  source 1..20: mol_type = other DNA
cccggtactgccagccaggg

SEQ ID NO: 284954 - DNA, 20 bp, synthetic construct
  source 1..20: mol_type = other DNA
tcccggtactgccagccagg

SEQ ID NO: 284955 - DNA, 20 bp, synthetic construct
  source 1..20: mol_type = other DNA
gtcccggtactgccagccag

SEQ ID NO: 284956 - DNA, 20 bp, synthetic construct
  source 1..20: mol_type = other DNA
tgtcccggtactgccagcca

SEQ ID NO: 284957 - DNA, 20 bp, synthetic construct
  source 1..20: mol_type = other DNA
gtgtcccggtactgccagcc

SEQ ID NO: 284958 - DNA, 20 bp, synthetic construct
  source 1..20: mol_type = other DNA
agtgtcccggtactgccagc

SEQ ID NO: 284959 - DNA, 20 bp, synthetic construct
  source 1..20: mol_type = other DNA
cagtgtcccggtactgccag

SEQ ID NO: 284960 - DNA, 20 bp, synthetic construct
  source 1..20: mol_type = other DNA
gcagtgtcccggtactgcca

SEQ ID NO: 284961 - DNA, 20 bp, synthetic construct
  source 1..20: mol_type = other DNA
agcagtgtcccggtactgcc

SEQ ID NO: 284962 - DNA, 20 bp, synthetic construct
  source 1..20: mol_type = other DNA
cagcagtgtcccggtactgc

SEQ ID NO: 284963 - DNA, 20 bp, synthetic construct
  source 1..20: mol_type = other DNA
acagcagtgtcccggtactg

SEQ ID NO: 284964 - DNA, 20 bp, synthetic construct
  source 1..20: mol_type = other DNA
cacagcagtgtcccggtact

SEQ ID NO: 284965 - DNA, 20 bp, synthetic construct
  source 1..20: mol_type = other DNA
ccacagcagtgtcccggtac

SEQ ID NO: 284966 - DNA, 20 bp, synthetic construct
  source 1..20: mol_type = other DNA
gccacagcagtgtcccggta

SEQ ID NO: 284967 - DNA, 20 bp, synthetic construct
  source 1..20: mol_type = other DNA
agccacagcagtgtcccggt

SEQ ID NO: 284968 - DNA, 20 bp, synthetic construct
  source 1..20: mol_type = other DNA
gagccacagcagtgtcccgg

SEQ ID NO: 284969 - DNA, 20 bp, synthetic construct
  source 1..20: mol_type = other DNA
ggagccacagcagtgtcccg

SEQ ID NO: 284970 - DNA, 20 bp, synthetic construct
  source 1..20: mol_type = other DNA
cggagccacagcagtgtccc

SEQ ID NO: 284971 - DNA, 20 bp, synthetic construct
  source 1..20: mol_type = other DNA
ccggagccacagcagtgtcc

SEQ ID NO: 284972 - DNA, 20 bp, synthetic construct
  source 1..20: mol_type = other DNA
cccggagccacagcagtgtc

SEQ ID NO: 284973 - DNA, 20 bp, synthetic construct
  source 1..20: mol_type = other DNA
ccccggagccacagcagtgt

SEQ ID NO: 284974 - DNA, 20 bp, synthetic construct
  source 1..20: mol_type = other DNA
accccggagccacagcagtg

SEQ ID NO: 284975 - DNA, 20 bp, synthetic construct
  source 1..20: mol_type = other DNA
caccccggagccacagcagt

SEQ ID NO: 284976 - DNA, 20 bp, synthetic construct
  source 1..20: mol_type = other DNA
ccaccccggagccacagcag

SEQ ID NO: 284977 - DNA, 20 bp, synthetic construct
  source 1..20: mol_type = other DNA
cccaccccggagccacagca

SEQ ID NO: 284978 - DNA, 20 bp, synthetic construct
  source 1..20: mol_type = other DNA
gcccaccccggagccacagc

SEQ ID NO: 284979 - DNA, 20 bp, synthetic construct
  source 1..20: mol_type = other DNA
agcccaccccggagccacag

SEQ ID NO: 284980 - DNA, 20 bp, synthetic construct
  source 1..20: mol_type = other DNA
cagcccaccccggagccaca

SEQ ID NO: 284981 - DNA, 20 bp, synthetic construct
  source 1..20: mol_type = other DNA
acagcccaccccggagccac

SEQ ID NO: 284982 - DNA, 20 bp, synthetic construct
  source 1..20: mol_type = other DNA
gacagcccaccccggagcca

SEQ ID NO: 284983 - DNA, 20 bp, synthetic construct
  source 1..20: mol_type = other DNA
agacagcccaccccggagcc

SEQ ID NO: 284984 - DNA, 20 bp, synthetic construct
  source 1..20: mol_type = other DNA
gagacagcccaccccggagc

SEQ ID NO: 284985 - DNA, 20 bp, synthetic construct
  source 1..20: mol_type = other DNA
ggagacagcccaccccggag

SEQ ID NO: 284986 - DNA, 20 bp, synthetic construct
  source 1..20: mol_type = other DNA
tggagacagcccaccccgga

SEQ ID NO: 284987 - DNA, 20 bp, synthetic construct
  source 1..20: mol_type = other DNA
ctggagacagcccaccccgg

SEQ ID NO: 284988 - DNA, 20 bp, synthetic construct
  source 1..20: mol_type = other DNA
tctggagacagcccaccccg

SEQ ID NO: 284989 - DNA, 20 bp, synthetic construct
  source 1..20: mol_type = other DNA
ttctggagacagcccacccc

SEQ ID NO: 284990 - DNA, 20 bp, synthetic construct
  source 1..20: mol_type = other DNA
tttctggagacagcccaccc

SEQ ID NO: 284991 - DNA, 20 bp, synthetic construct
  source 1..20: mol_type = other DNA
ttttctggagacagcccacc

SEQ ID NO: 284992 - DNA, 20 bp, synthetic construct
  source 1..20: mol_type = other DNA
attttctggagacagcccac

SEQ ID NO: 284993 - DNA, 20 bp, synthetic construct
  source 1..20: mol_type = other DNA
cattttctggagacagccca

SEQ ID NO: 284994 - DNA, 20 bp, synthetic construct
  source 1..20: mol_type = other DNA
gcattttctggagacagccc

SEQ ID NO: 284995 - DNA, 20 bp, synthetic construct
  source 1..20: mol_type = other DNA
ggcattttctggagacagcc

SEQ ID NO: 284996 - DNA, 20 bp, synthetic construct
  source 1..20: mol_type = other DNA
aggcattttctggagacagc

SEQ ID NO: 284997 - DNA, 20 bp, synthetic construct
  source 1..20: mol_type = other DNA
caggcattttctggagacag

SEQ ID NO: 284998 - DNA, 20 bp, synthetic construct
  source 1..20: mol_type = other DNA
ccaggcattttctggagaca

SEQ ID NO: 284999 - DNA, 20 bp, synthetic construct
  source 1..20: mol_type = other DNA
gccaggcattttctggagac

SEQ ID NO: 285000 - DNA, 20 bp, synthetic construct
  source 1..20: mol_type = other DNA
ggccaggcattttctggaga

SEQ ID NO: 285001 - DNA, 20 bp, synthetic construct
  source 1..20: mol_type = other DNA
aggccaggcattttctggag

SEQ ID NO: 285002 - DNA, 20 bp, synthetic construct
  source 1..20: mol_type = other DNA
caggccaggcattttctgga

SEQ ID NO: 285003 - DNA, 20 bp, synthetic construct
  source 1..20: mol_type = other DNA
tcaggccaggcattttctgg

SEQ ID NO: 285004 - DNA, 20 bp, synthetic construct
  source 1..20: mol_type = other DNA
ctcaggccaggcattttctg

SEQ ID NO: 285005 - DNA, 20 bp, synthetic construct
  source 1..20: mol_type = other DNA
cctcaggccaggcattttct

SEQ ID NO: 285006 - DNA, 20 bp, synthetic construct
  source 1..20: mol_type = other DNA
gcctcaggccaggcattttc

SEQ ID NO: 285007 - DNA, 20 bp, synthetic construct
  source 1..20: mol_type = other DNA
tgcctcaggccaggcatttt

SEQ ID NO: 285008 - DNA, 20 bp, synthetic construct
  source 1..20: mol_type = other DNA
ctgcctcaggccaggcattt

SEQ ID NO: 285009 - DNA, 20 bp, synthetic construct
  source 1..20: mol_type = other DNA
gctgcctcaggccaggcatt

SEQ ID NO: 285010 - DNA, 20 bp, synthetic construct
  source 1..20: mol_type = other DNA
ggctgcctcaggccaggcat

SEQ ID NO: 285011 - DNA, 20 bp, synthetic construct
  source 1..20: mol_type = other DNA
tggctgcctcaggccaggca

SEQ ID NO: 285012 - DNA, 20 bp, synthetic construct
  source 1..20: mol_type = other DNA
gtggctgcctcaggccaggc

SEQ ID NO: 285013 - DNA, 20 bp, synthetic construct
  source 1..20: mol_type = other DNA
ggtggctgcctcaggccagg

SEQ ID NO: 285014 - DNA, 20 bp, synthetic construct
  source 1..20: mol_type = other DNA
gggtggctgcctcaggccag

SEQ ID NO: 285015 - DNA, 20 bp, synthetic construct
  source 1..20: mol_type = other DNA
cgggtggctgcctcaggcca

SEQ ID NO: 285016 - DNA, 20 bp, synthetic construct
  source 1..20: mol_type = other DNA
gcgggtggctgcctcaggcc

SEQ ID NO: 285017 - DNA, 20 bp, synthetic construct
  source 1..20: mol_type = other DNA
tgcgggtggctgcctcaggc

SEQ ID NO: 285018 - DNA, 20 bp, synthetic construct
  source 1..20: mol_type = other DNA
atgcgggtggctgcctcagg

SEQ ID NO: 285019 - DNA, 20 bp, synthetic construct
  source 1..20: mol_type = other DNA
gatgcgggtggctgcctcag

SEQ ID NO: 285020 - DNA, 20 bp, synthetic construct
  source 1..20: mol_type = other DNA
ggatgcgggtggctgcctca

SEQ ID NO: 285021 - DNA, 20 bp, synthetic construct
  source 1..20: mol_type = other DNA
tggatgcgggtggctgcctc

SEQ ID NO: 285022 - DNA, 20 bp, synthetic construct
  source 1..20: mol_type = other DNA
ctggatgcgggtggctgcct

SEQ ID NO: 285023 - DNA, 20 bp, synthetic construct
  source 1..20: mol_type = other DNA
gctggatgcgggtggctgcc

SEQ ID NO: 285024 - DNA, 20 bp, synthetic construct
  source 1..20: mol_type = other DNA
ggctggatgcgggtggctgc

SEQ ID NO: 285025 - DNA, 20 bp, synthetic construct
  source 1..20: mol_type = other DNA
gggctggatgcgggtggctg

SEQ ID NO: 285026 - DNA, 20 bp, synthetic construct
  source 1..20: mol_type = other DNA
tgggctggatgcgggtggct

SEQ ID NO: 285027 - DNA, 20 bp, synthetic construct
  source 1..20: mol_type = other DNA
ctgggctggatgcgggtggc

SEQ ID NO: 285028 - DNA, 20 bp, synthetic construct
  source 1..20: mol_type = other DNA
tctgggctggatgcgggtgg

SEQ ID NO: 285029 - DNA, 20 bp, synthetic construct
  source 1..20: mol_type = other DNA
ctctgggctggatgcgggtg

SEQ ID NO: 285030 - DNA, 20 bp, synthetic construct
  source 1..20: mol_type = other DNA
cctctgggctggatgcgggt

SEQ ID NO: 285031 - DNA, 20 bp, synthetic construct
  source 1..20: mol_type = other DNA
ccctctgggctggatgcggg

SEQ ID NO: 285032 - DNA, 20 bp, synthetic construct
  source 1..20: mol_type = other DNA
accctctgggctggatgcgg

SEQ ID NO: 285033 - DNA, 20 bp, synthetic construct
  source 1..20: mol_type = other DNA
aaccctctgggctggatgcg

SEQ ID NO: 285034 - DNA, 20 bp, synthetic construct
  source 1..20: mol_type = other DNA
aaaccctctgggctggatgc

SEQ ID NO: 285035 - DNA, 20 bp, synthetic construct
  source 1..20: mol_type = other DNA
taaaccctctgggctggatg

SEQ ID NO: 285036 - DNA, 20 bp, synthetic construct
  source 1..20: mol_type = other DNA
ataaaccctctgggctggat

SEQ ID NO: 285037 - DNA, 20 bp, synthetic construct
  source 1..20: mol_type = other DNA
aataaaccctctgggctgga

SEQ ID NO: 285038 - DNA, 20 bp, synthetic construct
  source 1..20: mol_type = other DNA
gaataaaccctctgggctgg

SEQ ID NO: 285039 - DNA, 20 bp, synthetic construct
  source 1..20: mol_type = other DNA
agaataaaccctctgggctg

SEQ ID NO: 285040 - DNA, 20 bp, synthetic construct
  source 1..20: mol_type = other DNA
aagaataaaccctctgggct

SEQ ID NO: 285041 - DNA, 20 bp, synthetic construct
  source 1..20: mol_type = other DNA
caagaataaaccctctgggc

SEQ ID NO: 285042 - DNA, 20 bp, synthetic construct
  source 1..20: mol_type = other DNA
gcaagaataaaccctctggg

SEQ ID NO: 285043 - DNA, 20 bp, synthetic construct
  source 1..20: mol_type = other DNA
tgcaagaataaaccctctgg

SEQ ID NO: 285044 - DNA, 20 bp, synthetic construct
  source 1..20: mol_type = other DNA
ttgcaagaataaaccctctg

SEQ ID NO: 285045 - DNA, 20 bp, synthetic construct
  source 1..20: mol_type = other DNA
attgcaagaataaaccctct

SEQ ID NO: 285046 - DNA, 20 bp, synthetic construct
  source 1..20: mol_type = other DNA
cattgcaagaataaaccctc

SEQ ID NO: 285047 - DNA, 20 bp, synthetic construct
  source 1..20: mol_type = other DNA
acattgcaagaataaaccct

SEQ ID NO: 285048 - DNA, 20 bp, synthetic construct
  source 1..20: mol_type = other DNA
cacattgcaagaataaaccc

SEQ ID NO: 285049 - DNA, 20 bp, synthetic construct
  source 1..20: mol_type = other DNA
gcacattgcaagaataaacc

SEQ ID NO: 285050 - DNA, 20 bp, synthetic construct
  source 1..20: mol_type = other DNA
agcacattgcaagaataaac

SEQ ID NO: 285051 - DNA, 20 bp, synthetic construct
  source 1..20: mol_type = other DNA
cagcacattgcaagaataaa

SEQ ID NO: 285052 - DNA, 20 bp, synthetic construct
  source 1..20: mol_type = other DNA
gcagcacattgcaagaataa

SEQ ID NO: 285053 - DNA, 20 bp, synthetic construct
  source 1..20: mol_type = other DNA
agcagcacattgcaagaata

SEQ ID NO: 285054 - DNA, 20 bp, synthetic construct
  source 1..20: mol_type = other DNA
cagcagcacattgcaagaat

SEQ ID NO: 285055 - DNA, 20 bp, synthetic construct
  source 1..20: mol_type = other DNA
gcagcagcacattgcaagaa

SEQ ID NO: 285056 - DNA, 20 bp, synthetic construct
  source 1..20: mol_type = other DNA
agcagcagcacattgcaaga

SEQ ID NO: 285057 - DNA, 20 bp, synthetic construct
  source 1..20: mol_type = other DNA
aagcagcagcacattgcaag

SEQ ID NO: 285058 - DNA, 20 bp, synthetic construct
  source 1..20: mol_type = other DNA
gaagcagcagcacattgcaa

SEQ ID NO: 285059 - DNA, 20 bp, synthetic construct
  source 1..20: mol_type = other DNA
ggaagcagcagcacattgca

SEQ ID NO: 285060 - DNA, 20 bp, synthetic construct
  source 1..20: mol_type = other DNA
aggaagcagcagcacattgc

SEQ ID NO: 285061 - DNA, 20 bp, synthetic construct
  source 1..20: mol_type = other DNA
caggaagcagcagcacattg

SEQ ID NO: 285062 - DNA, 20 bp, synthetic construct
  source 1..20: mol_type = other DNA
gcaggaagcagcagcacatt

SEQ ID NO: 285063 - DNA, 20 bp, synthetic construct
  source 1..20: mol_type = other DNA
ggcaggaagcagcagcacat

SEQ ID NO: 285064 - DNA, 20 bp, synthetic construct
  source 1..20: mol_type = other DNA
gggcaggaagcagcagcaca

SEQ ID NO: 285065 - DNA, 20 bp, synthetic construct
  source 1..20: mol_type = other DNA
agggcaggaagcagcagcac

SEQ ID NO: 285066 - DNA, 20 bp, synthetic construct
  source 1..20: mol_type = other DNA
cagggcaggaagcagcagca

SEQ ID NO: 285067 - DNA, 20 bp, synthetic construct
  source 1..20: mol_type = other DNA
tcagggcaggaagcagcagc

SEQ ID NO: 285068 - DNA, 20 bp, synthetic construct
  source 1..20: mol_type = other DNA
ctcagggcaggaagcagcag

SEQ ID NO: 285069 - DNA, 20 bp, synthetic construct
  source 1..20: mol_type = other DNA
gctcagggcaggaagcagca

SEQ ID NO: 285070 - DNA, 20 bp, synthetic construct
  source 1..20: mol_type = other DNA
tgctcagggcaggaagcagc

SEQ ID NO: 285071 - DNA, 20 bp, synthetic construct
  source 1..20: mol_type = other DNA
gtgctcagggcaggaagcag

SEQ ID NO: 285072 - DNA, 20 bp, synthetic construct
  source 1..20: mol_type = other DNA
ggtgctcagggcaggaagca

SEQ ID NO: 285073 - DNA, 20 bp, synthetic construct
  source 1..20: mol_type = other DNA
aggtgctcagggcaggaagc

SEQ ID NO: 285074 - DNA, 20 bp, synthetic construct
  source 1..20: mol_type = other DNA
caggtgctcagggcaggaag

SEQ ID NO: 285075 - DNA, 20 bp, synthetic construct
  source 1..20: mol_type = other DNA
ccaggtgctcagggcaggaa

SEQ ID NO: 285076 - DNA, 20 bp, synthetic construct
  source 1..20: mol_type = other DNA
tccaggtgctcagggcagga

SEQ ID NO: 285077 - DNA, 20 bp, synthetic construct
  source 1..20: mol_type = other DNA
atccaggtgctcagggcagg

SEQ ID NO: 285078 - DNA, 20 bp, synthetic construct
  source 1..20: mol_type = other DNA
gatccaggtgctcagggcag

SEQ ID NO: 285079 - DNA, 20 bp, synthetic construct
  source 1..20: mol_type = other DNA
ggatccaggtgctcagggca

SEQ ID NO: 285080 - DNA, 20 bp, synthetic construct
  source 1..20: mol_type = other DNA
gggatccaggtgctcagggc

SEQ ID NO: 285081 - DNA, 20 bp, synthetic construct
  source 1..20: mol_type = other DNA
cgggatccaggtgctcaggg

SEQ ID NO: 285082 - DNA, 20 bp, synthetic construct
  source 1..20: mol_type = other DNA
ccgggatccaggtgctcagg

SEQ ID NO: 285083 - DNA, 20 bp, synthetic construct
  source 1..20: mol_type = other DNA
gccgggatccaggtgctcag

SEQ ID NO: 285084 - DNA, 20 bp, synthetic construct
  source 1..20: mol_type = other DNA
agccgggatccaggtgctca

SEQ ID NO: 285085 - DNA, 20 bp, synthetic construct
  source 1..20: mol_type = other DNA
aagccgggatccaggtgctc

SEQ ID NO: 285086 - DNA, 20 bp, synthetic construct
  source 1..20: mol_type = other DNA
gaagccgggatccaggtgct

SEQ ID NO: 285087 - DNA, 20 bp, synthetic construct
  source 1..20: mol_type = other DNA
agaagccgggatccaggtgc

SEQ ID NO: 285088 - DNA, 20 bp, synthetic construct
  source 1..20: mol_type = other DNA
cagaagccgggatccaggtg

SEQ ID NO: 285089 - DNA, 20 bp, synthetic construct
  source 1..20: mol_type = other DNA
gcagaagccgggatccaggt

SEQ ID NO: 285090 - DNA, 20 bp, synthetic construct
  source 1..20: mol_type = other DNA
ggcagaagccgggatccagg

SEQ ID NO: 285091 - DNA, 20 bp, synthetic construct
  source 1..20: mol_type = other DNA
gggcagaagccgggatccag

SEQ ID NO: 285092 - DNA, 20 bp, synthetic construct
  source 1..20: mol_type = other DNA
agggcagaagccgggatcca

SEQ ID NO: 285093 - DNA, 20 bp, synthetic construct
  source 1..20: mol_type = other DNA
cagggcagaagccgggatcc

SEQ ID NO: 285094 - DNA, 20 bp, synthetic construct
  source 1..20: mol_type = other DNA
tcagggcagaagccgggatc

SEQ ID NO: 285095 - DNA, 20 bp, synthetic construct
  source 1..20: mol_type = other DNA
ctcagggcagaagccgggat

SEQ ID NO: 285096 - DNA, 20 bp, synthetic construct
  source 1..20: mol_type = other DNA
cctcagggcagaagccggga

SEQ ID NO: 285097 - DNA, 20 bp, synthetic construct
  source 1..20: mol_type = other DNA
gcctcagggcagaagccggg

SEQ ID NO: 285098 - DNA, 20 bp, synthetic construct
  source 1..20: mol_type = other DNA
ggcctcagggcagaagccgg

SEQ ID NO: 285099 - DNA, 20 bp, synthetic construct
  source 1..20: mol_type = other DNA
gggcctcagggcagaagccg

SEQ ID NO: 285100 - DNA, 20 bp, synthetic construct
  source 1..20: mol_type = other DNA
ggggcctcagggcagaagcc

SEQ ID NO: 285101 - DNA, 20 bp, synthetic construct
  source 1..20: mol_type = other DNA
aggggcctcagggcagaagc

SEQ ID NO: 285102 - DNA, 20 bp, synthetic construct
  source 1..20: mol_type = other DNA
aaggggcctcagggcagaag

SEQ ID NO: 285103 - DNA, 20 bp, synthetic construct
  source 1..20: mol_type = other DNA
caaggggcctcagggcagaa

SEQ ID NO: 285104 - DNA, 20 bp, synthetic construct
  source 1..20: mol_type = other DNA
tcaaggggcctcagggcaga

SEQ ID NO: 285105 - DNA, 20 bp, synthetic construct
  source 1..20: mol_type = other DNA
ctcaaggggcctcagggcag

SEQ ID NO: 285106 - DNA, 20 bp, synthetic construct
  source 1..20: mol_type = other DNA
actcaaggggcctcagggca

SEQ ID NO: 285107 - DNA, 20 bp, synthetic construct
  source 1..20: mol_type = other DNA
gactcaaggggcctcagggc

SEQ ID NO: 285108 - DNA, 20 bp, synthetic construct
  source 1..20: mol_type = other DNA
ggactcaaggggcctcaggg

SEQ ID NO: 285109 - DNA, 20 bp, synthetic construct
  source 1..20: mol_type = other DNA
gggactcaaggggcctcagg

SEQ ID NO: 285110 - DNA, 20 bp, synthetic construct
  source 1..20: mol_type = other DNA
tgggactcaaggggcctcag

SEQ ID NO: 285111 - DNA, 20 bp, synthetic construct
  source 1..20: mol_type = other DNA
gtgggactcaaggggcctca

SEQ ID NO: 285112 - DNA, 20 bp, synthetic construct
  source 1..20: mol_type = other DNA
tgtgggactcaaggggcctc

SEQ ID NO: 285113 - DNA, 20 bp, synthetic construct
  source 1..20: mol_type = other DNA
ctgtgggactcaaggggcct

SEQ ID NO: 285114 - DNA, 20 bp, synthetic construct
  source 1..20: mol_type = other DNA
cctgtgggactcaaggggcc

SEQ ID NO: 285115 - DNA, 20 bp, synthetic construct
  source 1..20: mol_type = other DNA
acctgtgggactcaaggggc

SEQ ID NO: 285116 - DNA, 20 bp, synthetic construct
  source 1..20: mol_type = other DNA
tacctgtgggactcaagggg

SEQ ID NO: 285117 - DNA, 20 bp, synthetic construct
  source 1..20: mol_type = other DNA
ctacctgtgggactcaaggg

SEQ ID NO: 285118 - DNA, 20 bp, synthetic construct
  source 1..20: mol_type = other DNA
gctacctgtgggactcaagg

SEQ ID NO: 285119 - DNA, 20 bp, synthetic construct
  source 1..20: mol_type = other DNA
tgctacctgtgggactcaag

SEQ ID NO: 285120 - DNA, 20 bp, synthetic construct
  source 1..20: mol_type = other DNA
ttgctacctgtgggactcaa

SEQ ID NO: 285121 - DNA, 20 bp, synthetic construct
  source 1..20: mol_type = other DNA
cttgctacctgtgggactca

SEQ ID NO: 285122 - DNA, 20 bp, synthetic construct
  source 1..20: mol_type = other DNA
gcttgctacctgtgggactc

SEQ ID NO: 285123 - DNA, 20 bp, synthetic construct
  source 1..20: mol_type = other DNA
cgcttgctacctgtgggact

SEQ ID NO: 285124 - DNA, 20 bp, synthetic construct
  source 1..20: mol_type = other DNA
gcgcttgctacctgtgggac

SEQ ID NO: 285125 - DNA, 20 bp, synthetic construct
  source 1..20: mol_type = other DNA
agcgcttgctacctgtggga

SEQ ID NO: 285126 - DNA, 20 bp, synthetic construct
  source 1..20: mol_type = other DNA
aagcgcttgctacctgtggg

SEQ ID NO: 285127 - DNA, 20 bp, synthetic construct
  source 1..20: mol_type = other DNA
caagcgcttgctacctgtgg

SEQ ID NO: 285128 - DNA, 20 bp, synthetic construct
  source 1..20: mol_type = other DNA
gcaagcgcttgctacctgtg

SEQ ID NO: 285129 - DNA, 20 bp, synthetic construct
  source 1..20: mol_type = other DNA
ggcaagcgcttgctacctgt

SEQ ID NO: 285130 - DNA, 20 bp, synthetic construct
  source 1..20: mol_type = other DNA
gggcaagcgcttgctacctg

SEQ ID NO: 285131 - DNA, 20 bp, synthetic construct
  source 1..20: mol_type = other DNA
agggcaagcgcttgctacct

SEQ ID NO: 285132 - DNA, 20 bp, synthetic construct
  source 1..20: mol_type = other DNA
cagggcaagcgcttgctacc

SEQ ID NO: 285133 - DNA, 20 bp, synthetic construct
  source 1..20: mol_type = other DNA
gcagggcaagcgcttgctac

SEQ ID NO: 285134 - DNA, 20 bp, synthetic construct
  source 1..20: mol_type = other DNA
cgcagggcaagcgcttgcta

SEQ ID NO: 285135 - DNA, 20 bp, synthetic construct
  source 1..20: mol_type = other DNA
ccgcagggcaagcgcttgct

SEQ ID NO: 285136 - DNA, 20 bp, synthetic construct
  source 1..20: mol_type = other DNA
gccgcagggcaagcgcttgc

SEQ ID NO: 285137 - DNA, 20 bp, synthetic construct
  source 1..20: mol_type = other DNA
agccgcagggcaagcgcttg

SEQ ID NO: 285138 - DNA, 20 bp, synthetic construct
  source 1..20: mol_type = other DNA
cagccgcagggcaagcgctt

SEQ ID NO: 285139 - DNA, 20 bp, synthetic construct
  source 1..20: mol_type = other DNA
gcagccgcagggcaagcgct

SEQ ID NO: 285140 - DNA, 20 bp, synthetic construct
  source 1..20: mol_type = other DNA
agcagccgcagggcaagcgc

SEQ ID NO: 285141 - DNA, 20 bp, synthetic construct
  source 1..20: mol_type = other DNA
cagcagccgcagggcaagcg

SEQ ID NO: 285142 - DNA, 20 bp, synthetic construct
  source 1..20: mol_type = other DNA
gcagcagccgcagggcaagc

SEQ ID NO: 285143 - DNA, 20 bp, synthetic construct
  source 1..20: mol_type = other DNA
tgcagcagccgcagggcaag

SEQ ID NO: 285144 - DNA, 20 bp, synthetic construct
  source 1..20: mol_type = other DNA
atgcagcagccgcagggcaa

SEQ ID NO: 285145 - DNA, 20 bp, synthetic construct
  source 1..20: mol_type = other DNA
catgcagcagccgcagggca

SEQ ID NO: 285146 - DNA, 20 bp, synthetic construct
  source 1..20: mol_type = other DNA
ccatgcagcagccgcagggc

SEQ ID NO: 285147 - DNA, 20 bp, synthetic construct
  source 1..20: mol_type = other DNA
cccatgcagcagccgcaggg

SEQ ID NO: 285148 - DNA, 20 bp, synthetic construct
  source 1..20: mol_type = other DNA
ccccatgcagcagccgcagg

SEQ ID NO: 285149 - DNA, 20 bp, synthetic construct
  source 1..20: mol_type = other DNA
gccccatgcagcagccgcag

SEQ ID NO: 285150 - DNA, 20 bp, synthetic construct
  source 1..20: mol_type = other DNA
agccccatgcagcagccgca

SEQ ID NO: 285151 - DNA, 20 bp, synthetic construct
  source 1..20: mol_type = other DNA
tagccccatgcagcagccgc

SEQ ID NO: 285152 - DNA, 20 bp, synthetic construct
  source 1..20: mol_type = other DNA
ttagccccatgcagcagccg

SEQ ID NO: 285153 - DNA, 20 bp, synthetic construct
  source 1..20: mol_type = other DNA
gttagccccatgcagcagcc

SEQ ID NO: 285154 - DNA, 20 bp, synthetic construct
  source 1..20: mol_type = other DNA
agttagccccatgcagcagc

SEQ ID NO: 285155 - DNA, 20 bp, synthetic construct
  source 1..20: mol_type = other DNA
tagttagccccatgcagcag

SEQ ID NO: 285156 - DNA, 20 bp, synthetic construct
  source 1..20: mol_type = other DNA
ttagttagccccatgcagca

SEQ ID NO: 285157 - DNA, 20 bp, synthetic construct
  source 1..20: mol_type = other DNA
gttagttagccccatgcagc

SEQ ID NO: 285158 - DNA, 20 bp, synthetic construct
  source 1..20: mol_type = other DNA
cgttagttagccccatgcag

SEQ ID NO: 285159 - DNA, 20 bp, synthetic construct
  source 1..20: mol_type = other DNA
gcgttagttagccccatgca

SEQ ID NO: 285160 - DNA, 20 bp, synthetic construct
  source 1..20: mol_type = other DNA
agcgttagttagccccatgc

SEQ ID NO: 285161 - DNA, 20 bp, synthetic construct
  source 1..20: mol_type = other DNA
aagcgttagttagccccatg

SEQ ID NO: 285162 - DNA, 20 bp, synthetic construct
  source 1..20: mol_type = other DNA
gaagcgttagttagccccat

SEQ ID NO: 285163 - DNA, 20 bp, synthetic construct
  source 1..20: mol_type = other DNA
ggaagcgttagttagcccca

SEQ ID NO: 285164 - DNA, 20 bp, synthetic construct
  source 1..20: mol_type = other DNA
aggaagcgttagttagcccc

SEQ ID NO: 285165 - DNA, 20 bp, synthetic construct
  source 1..20: mol_type = other DNA
gaggaagcgttagttagccc

SEQ ID NO: 285166 - DNA, 20 bp, synthetic construct
  source 1..20: mol_type = other DNA
tgaggaagcgttagttagcc

SEQ ID NO: 285167 - DNA, 20 bp, synthetic construct
  source 1..20: mol_type = other DNA
gtgaggaagcgttagttagc

SEQ ID NO: 285168 - DNA, 20 bp, synthetic construct
  source 1..20: mol_type = other DNA
ggtgaggaagcgttagttag

SEQ ID NO: 285169 - DNA, 20 bp, synthetic construct
  source 1..20: mol_type = other DNA
tggtgaggaagcgttagtta

SEQ ID NO: 285170 - DNA, 20 bp, synthetic construct
  source 1..20: mol_type = other DNA
ctggtgaggaagcgttagtt

SEQ ID NO: 285171 - DNA, 20 bp, synthetic construct
  source 1..20: mol_type = other DNA
actggtgaggaagcgttagt

SEQ ID NO: 285172 - DNA, 20 bp, synthetic construct
  source 1..20: mol_type = other DNA
cactggtgaggaagcgttag

SEQ ID NO: 285173 - DNA, 20 bp, synthetic construct
  source 1..20: mol_type = other DNA
acactggtgaggaagcgtta

SEQ ID NO: 285174 - DNA, 20 bp, synthetic construct
  source 1..20: mol_type = other DNA
gacactggtgaggaagcgtt

SEQ ID NO: 285175 - DNA, 20 bp, synthetic construct
  source 1..20: mol_type = other DNA
agacactggtgaggaagcgt

SEQ ID NO: 285176 - DNA, 20 bp, synthetic construct
  source 1..20: mol_type = other DNA
cagacactggtgaggaagcg

SEQ ID NO: 285177 - DNA, 20 bp, synthetic construct
  source 1..20: mol_type = other DNA
gcagacactggtgaggaagc

SEQ ID NO: 285178 - DNA, 20 bp, synthetic construct
  source 1..20: mol_type = other DNA
agcagacactggtgaggaag

SEQ ID NO: 285179 - DNA, 20 bp, synthetic construct
  source 1..20: mol_type = other DNA
tagcagacactggtgaggaa

SEQ ID NO: 285180 - DNA, 20 bp, synthetic construct
  source 1..20: mol_type = other DNA
ttagcagacactggtgagga

SEQ ID NO: 285181 - DNA, 20 bp, synthetic construct
  source 1..20: mol_type = other DNA
cttagcagacactggtgagg

SEQ ID NO: 285182 - DNA, 20 bp, synthetic construct
  source 1..20: mol_type = other DNA
acttagcagacactggtgag

SEQ ID NO: 285183 - DNA, 20 bp, synthetic construct
  source 1..20: mol_type = other DNA
cacttagcagacactggtga

SEQ ID NO: 285184 - DNA, 20 bp, synthetic construct
  source 1..20: mol_type = other DNA
acacttagcagacactggtg

SEQ ID NO: 285185 - DNA, 20 bp, synthetic construct
  source 1..20: mol_type = other DNA
gacacttagcagacactggt

SEQ ID NO: 285186 - DNA, 20 bp, synthetic construct
  source 1..20: mol_type = other DNA
agacacttagcagacactgg

SEQ ID NO: 285187 - DNA, 20 bp, synthetic construct
  source 1..20: mol_type = other DNA
gagacacttagcagacactg

SEQ ID NO: 285188 - DNA, 20 bp, synthetic construct
  source 1..20: mol_type = other DNA
ggagacacttagcagacact

SEQ ID NO: 285189 - DNA, 20 bp, synthetic construct
  source 1..20: mol_type = other DNA
aggagacacttagcagacac

SEQ ID NO: 285190 - DNA, 20 bp, synthetic construct
  source 1..20: mol_type = other DNA
gaggagacacttagcagaca

SEQ ID NO: 285191 - DNA, 20 bp, synthetic construct
  source 1..20: mol_type = other DNA
agaggagacacttagcagac

SEQ ID NO: 285192 - DNA, 20 bp, synthetic construct
  source 1..20: mol_type = other DNA
cagaggagacacttagcaga

SEQ ID NO: 285193 - DNA, 20 bp, synthetic construct
  source 1..20: mol_type = other DNA
acagaggagacacttagcag

SEQ ID NO: 285194 - DNA, 20 bp, synthetic construct
  source 1..20: mol_type = other DNA
gacagaggagacacttagca

SEQ ID NO: 285195 - DNA, 20 bp, synthetic construct
  source 1..20: mol_type = other DNA
agacagaggagacacttagc

SEQ ID NO: 285196 - DNA, 20 bp, synthetic construct
  source 1..20: mol_type = other DNA
gagacagaggagacacttag

SEQ ID NO: 285197 - DNA, 20 bp, synthetic construct
  source 1..20: mol_type = other DNA
ggagacagaggagacactta

SEQ ID NO: 285198 - DNA, 20 bp, synthetic construct
  source 1..20: mol_type = other DNA
gggagacagaggagacactt

SEQ ID NO: 285199 - DNA, 20 bp, synthetic construct
  source 1..20: mol_type = other DNA
tgggagacagaggagacact

SEQ ID NO: 285200 - DNA, 20 bp, synthetic construct
  source 1..20: mol_type = other DNA
gtgggagacagaggagacac

SEQ ID NO: 285201 - DNA, 20 bp, synthetic construct
  source 1..20: mol_type = other DNA
cgtgggagacagaggagaca

SEQ ID NO: 285202 - DNA, 20 bp, synthetic construct
  source 1..20: mol_type = other DNA
gcgtgggagacagaggagac

SEQ ID NO: 285203 - DNA, 20 bp, synthetic construct
  source 1..20: mol_type = other DNA
ggcgtgggagacagaggaga

SEQ ID NO: 285204 - DNA, 20 bp, synthetic construct
  source 1..20: mol_type = other DNA
gggcgtgggagacagaggag

SEQ ID NO: 285205 - DNA, 20 bp, synthetic construct
  source 1..20: mol_type = other DNA
agggcgtgggagacagagga

SEQ ID NO: 285206 - DNA, 20 bp, synthetic construct
  source 1..20: mol_type = other DNA
cagggcgtgggagacagagg

SEQ ID NO: 285207 - DNA, 20 bp, synthetic construct
  source 1..20: mol_type = other DNA
gcagggcgtgggagacagag

SEQ ID NO: 285208 - DNA, 20 bp, synthetic construct
  source 1..20: mol_type = other DNA
agcagggcgtgggagacaga

SEQ ID NO: 285209 - DNA, 20 bp, synthetic construct
  source 1..20: mol_type = other DNA
gagcagggcgtgggagacag

SEQ ID NO: 285210 - DNA, 20 bp, synthetic construct
  source 1..20: mol_type = other DNA
agagcagggcgtgggagaca

SEQ ID NO: 285211 - DNA, 20 bp, synthetic construct
  source 1..20: mol_type = other DNA
gagagcagggcgtgggagac

SEQ ID NO: 285212 - DNA, 20 bp, synthetic construct
  source 1..20: mol_type = other DNA
ggagagcagggcgtgggaga

SEQ ID NO: 285213 - DNA, 20 bp, synthetic construct
  source 1..20: mol_type = other DNA
aggagagcagggcgtgggag

SEQ ID NO: 285214 - DNA, 20 bp, synthetic construct
  source 1..20: mol_type = other DNA
caggagagcagggcgtggga

SEQ ID NO: 285215 - DNA, 20 bp, synthetic construct
  source 1..20: mol_type = other DNA
acaggagagcagggcgtggg

SEQ ID NO: 285216 - DNA, 20 bp, synthetic construct
  source 1..20: mol_type = other DNA
gacaggagagcagggcgtgg

SEQ ID NO: 285217 - DNA, 20 bp, synthetic construct
  source 1..20: mol_type = other DNA
ggacaggagagcagggcgtg

SEQ ID NO: 285218 - DNA, 20 bp, synthetic construct
  source 1..20: mol_type = other DNA
gggacaggagagcagggcgt

SEQ ID NO: 285219 - DNA, 20 bp, synthetic construct
  source 1..20: mol_type = other DNA
ggggacaggagagcagggcg

SEQ ID NO: 285220 - DNA, 20 bp, synthetic construct
  source 1..20: mol_type = other DNA
gggggacaggagagcagggc

SEQ ID NO: 285221 - DNA, 20 bp, synthetic construct
  source 1..20: mol_type = other DNA
ggggggacaggagagcaggg

SEQ ID NO: 285222 - DNA, 20 bp, synthetic construct
  source 1..20: mol_type = other DNA
tggggggacaggagagcagg

SEQ ID NO: 285223 - DNA, 20 bp, synthetic construct
  source 1..20: mol_type = other DNA
ctggggggacaggagagcag

SEQ ID NO: 285224 - DNA, 20 bp, synthetic construct
  source 1..20: mol_type = other DNA
actggggggacaggagagca

SEQ ID NO: 285225 - DNA, 20 bp, synthetic construct
  source 1..20: mol_type = other DNA
aactggggggacaggagagc

SEQ ID NO: 285226 - DNA, 20 bp, synthetic construct
  source 1..20: mol_type = other DNA
aaactggggggacaggagag

SEQ ID NO: 285227 - DNA, 20 bp, synthetic construct
  source 1..20: mol_type = other DNA
caaactggggggacaggaga

SEQ ID NO: 285228 - DNA, 20 bp, synthetic construct
  source 1..20: mol_type = other DNA
acaaactggggggacaggag

SEQ ID NO: 285229 - DNA, 20 bp, synthetic construct
  source 1..20: mol_type = other DNA
gacaaactggggggacagga

SEQ ID NO: 285230 - DNA, 20 bp, synthetic construct
  source 1..20: mol_type = other DNA
agacaaactggggggacagg

SEQ ID NO: 285231 - DNA, 20 bp, synthetic construct
  source 1..20: mol_type = other DNA
cagacaaactggggggacag

SEQ ID NO: 285232 - DNA, 20 bp, synthetic construct
  source 1..20: mol_type = other DNA
gcagacaaactggggggaca

SEQ ID NO: 285233 - DNA, 20 bp, synthetic construct
  source 1..20: mol_type = other DNA
agcagacaaactggggggac

SEQ ID NO: 285234 - DNA, 20 bp, synthetic construct
  source 1..20: mol_type = other DNA
cagcagacaaactgggggga

SEQ ID NO: 285235 - DNA, 20 bp, synthetic construct
  source 1..20: mol_type = other DNA
acagcagacaaactgggggg

SEQ ID NO: 285236 - DNA, 20 bp, synthetic construct
  source 1..20: mol_type = other DNA
cacagcagacaaactggggg

SEQ ID NO: 285237 - DNA, 20 bp, synthetic construct
  source 1..20: mol_type = other DNA
tcacagcagacaaactgggg

SEQ ID NO: 285238 - DNA, 20 bp, synthetic construct
  source 1..20: mol_type = other DNA
ctcacagcagacaaactggg

SEQ ID NO: 285239 - DNA, 20 bp, synthetic construct
  source 1..20: mol_type = other DNA
cctcacagcagacaaactgg

SEQ ID NO: 285240 - DNA, 20 bp, synthetic construct
  source 1..20: mol_type = other DNA
ccctcacagcagacaaactg

SEQ ID NO: 285241 - DNA, 20 bp, synthetic construct
  source 1..20: mol_type = other DNA
cccctcacagcagacaaact

SEQ ID NO: 285242 - DNA, 20 bp, synthetic construct
  source 1..20: mol_type = other DNA
tcccctcacagcagacaaac

SEQ ID NO: 285243 - DNA, 20 bp, synthetic construct
  source 1..20: mol_type = other DNA
gtcccctcacagcagacaaa

SEQ ID NO: 285244 - DNA, 20 bp, synthetic construct
  source 1..20: mol_type = other DNA
tgtcccctcacagcagacaa

SEQ ID NO: 285245 - DNA, 20 bp, synthetic construct
  source 1..20: mol_type = other DNA
ctgtcccctcacagcagaca

SEQ ID NO: 285246 - DNA, 20 bp, synthetic construct
  source 1..20: mol_type = other DNA
tctgtcccctcacagcagac

SEQ ID NO: 285247 - DNA, 20 bp, synthetic construct
  source 1..20: mol_type = other DNA
ttctgtcccctcacagcaga

SEQ ID NO: 285248 - DNA, 20 bp, synthetic construct
  source 1..20: mol_type = other DNA
cttctgtcccctcacagcag

SEQ ID NO: 285249 - DNA, 20 bp, synthetic construct
  source 1..20: mol_type = other DNA
tcttctgtcccctcacagca

SEQ ID NO: 285250 - DNA, 20 bp, synthetic construct
  source 1..20: mol_type = other DNA
ctcttctgtcccctcacagc

SEQ ID NO: 285251 - DNA, 20 bp, synthetic construct
  source 1..20: mol_type = other DNA
cctcttctgtcccctcacag

SEQ ID NO: 285252 - DNA, 20 bp, synthetic construct
  source 1..20: mol_type = other DNA
acctcttctgtcccctcaca

SEQ ID NO: 285253 - DNA, 20 bp, synthetic construct
  source 1..20: mol_type = other DNA
cacctcttctgtcccctcac

SEQ ID NO: 285254 - DNA, 20 bp, synthetic construct
  source 1..20: mol_type = other DNA
acacctcttctgtcccctca

SEQ ID NO: 285255 - DNA, 20 bp, synthetic construct
  source 1..20: mol_type = other DNA
cacacctcttctgtcccctc

SEQ ID NO: 285256 - DNA, 20 bp, synthetic construct
  source 1..20: mol_type = other DNA
acacacctcttctgtcccct

SEQ ID NO: 285257 - DNA, 20 bp, synthetic construct
  source 1..20: mol_type = other DNA
cacacacctcttctgtcccc

SEQ ID NO: 285258 - DNA, 20 bp, synthetic construct
  source 1..20: mol_type = other DNA
gcacacacctcttctgtccc

SEQ ID NO: 285259 - DNA, 20 bp, synthetic construct
  source 1..20: mol_type = other DNA
ggcacacacctcttctgtcc

SEQ ID NO: 285260 - DNA, 20 bp, synthetic construct
  source 1..20: mol_type = other DNA
cggcacacacctcttctgtc

SEQ ID NO: 285261 - DNA, 20 bp, synthetic construct
  source 1..20: mol_type = other DNA
gcggcacacacctcttctgt

SEQ ID NO: 285262 - DNA, 20 bp, synthetic construct
  source 1..20: mol_type = other DNA
ggcggcacacacctcttctg

SEQ ID NO: 285263 - DNA, 20 bp, synthetic construct
  source 1..20: mol_type = other DNA
gggcggcacacacctcttct

SEQ ID NO: 285264 - DNA, 20 bp, synthetic construct
  source 1..20: mol_type = other DNA
ggggcggcacacacctcttc

SEQ ID NO: 285265 - DNA, 20 bp, synthetic construct
  source 1..20: mol_type = other DNA
gggggcggcacacacctctt

SEQ ID NO: 285266 - DNA, 20 bp, synthetic construct
  source 1..20: mol_type = other DNA
tgggggcggcacacacctct

SEQ ID NO: 285267 - DNA, 20 bp, synthetic construct
  source 1..20: mol_type = other DNA
gtgggggcggcacacacctc

SEQ ID NO: 285268 - DNA, 20 bp, synthetic construct
  source 1..20: mol_type = other DNA
ggtgggggcggcacacacct

SEQ ID NO: 285269 - DNA, 20 bp, synthetic construct
  source 1..20: mol_type = other DNA
gggtgggggcggcacacacc

SEQ ID NO: 285270 - DNA, 20 bp, synthetic construct
  source 1..20: mol_type = other DNA
ggggtgggggcggcacacac

SEQ ID NO: 285271 - DNA, 20 bp, synthetic construct
  source 1..20: mol_type = other DNA
aggggtgggggcggcacaca

SEQ ID NO: 285272 - DNA, 20 bp, synthetic construct
  source 1..20: mol_type = other DNA
caggggtgggggcggcacac

SEQ ID NO: 285273 - DNA, 20 bp, synthetic construct
  source 1..20: mol_type = other DNA
gcaggggtgggggcggcaca

SEQ ID NO: 285274 - DNA, 20 bp, synthetic construct
  source 1..20: mol_type = other DNA
ggcaggggtgggggcggcac

SEQ ID NO: 285275 - DNA, 20 bp, synthetic construct
  source 1..20: mol_type = other DNA
gggcaggggtgggggcggca

SEQ ID NO: 285276 - DNA, 20 bp, synthetic construct
  source 1..20: mol_type = other DNA
cgggcaggggtgggggcggc

SEQ ID NO: 285277 - DNA, 20 bp, synthetic construct
  source 1..20: mol_type = other DNA
ccgggcaggggtgggggcgg

SEQ ID NO: 285278 - DNA, 20 bp, synthetic construct
  source 1..20: mol_type = other DNA
cccgggcaggggtgggggcg

SEQ ID NO: 285279 - DNA, 20 bp, synthetic construct
  source 1..20: mol_type = other DNA
gcccgggcaggggtgggggc

SEQ ID NO: 285280 - DNA, 20 bp, synthetic construct
  source 1..20: mol_type = other DNA
ggcccgggcaggggtggggg

SEQ ID NO: 285281 - DNA, 20 bp, synthetic construct
  source 1..20: mol_type = other DNA
gggcccgggcaggggtgggg

SEQ ID NO: 285282 - DNA, 20 bp, synthetic construct
  source 1..20: mol_type = other DNA
agggcccgggcaggggtggg

SEQ ID NO: 285283 - DNA, 20 bp, synthetic construct
  source 1..20: mol_type = other DNA
aagggcccgggcaggggtgg

SEQ ID NO: 285284 - DNA, 20 bp, synthetic construct
  source 1..20: mol_type = other DNA
caagggcccgggcaggggtg

SEQ ID NO: 285285 - DNA, 20 bp, synthetic construct
  source 1..20: mol_type = other DNA
acaagggcccgggcaggggt

SEQ ID NO: 285286 - DNA, 20 bp, synthetic construct
  source 1..20: mol_type = other DNA
aacaagggcccgggcagggg

SEQ ID NO: 285287 - DNA, 20 bp, synthetic construct
  source 1..20: mol_type = other DNA
gaacaagggcccgggcaggg

SEQ ID NO: 285288 - DNA, 20 bp, synthetic construct
  source 1..20: mol_type = other DNA
ggaacaagggcccgggcagg

SEQ ID NO: 285289 - DNA, 20 bp, synthetic construct
  source 1..20: mol_type = other DNA
aggaacaagggcccgggcag

SEQ ID NO: 285290 - DNA, 20 bp, synthetic construct
  source 1..20: mol_type = other DNA
caggaacaagggcccgggca

SEQ ID NO: 285291 - DNA, 20 bp, synthetic construct
  source 1..20: mol_type = other DNA
ccaggaacaagggcccgggc

SEQ ID NO: 285292 - DNA, 20 bp, synthetic construct
  source 1..20: mol_type = other DNA
cccaggaacaagggcccggg

SEQ ID NO: 285293 - DNA, 20 bp, synthetic construct
  source 1..20: mol_type = other DNA
tcccaggaacaagggcccgg

SEQ ID NO: 285294 - DNA, 20 bp, synthetic construct
  source 1..20: mol_type = other DNA
atcccaggaacaagggcccg

SEQ ID NO: 285295 - DNA, 20 bp, synthetic construct
  source 1..20: mol_type = other DNA
aatcccaggaacaagggccc

SEQ ID NO: 285296 - DNA, 20 bp, synthetic construct
  source 1..20: mol_type = other DNA
caatcccaggaacaagggcc

SEQ ID NO: 285297 - DNA, 20 bp, synthetic construct
  source 1..20: mol_type = other DNA
gcaatcccaggaacaagggc

SEQ ID NO: 285298 - DNA, 20 bp, synthetic construct
  source 1..20: mol_type = other DNA
agcaatcccaggaacaaggg

SEQ ID NO: 285299 - DNA, 20 bp, synthetic construct
  source 1..20: mol_type = other DNA
cagcaatcccaggaacaagg

SEQ ID NO: 285300 - DNA, 20 bp, synthetic construct
  source 1..20: mol_type = other DNA
acagcaatcccaggaacaag

SEQ ID NO: 285301 - DNA, 20 bp, synthetic construct
  source 1..20: mol_type = other DNA
aacagcaatcccaggaacaa

SEQ ID NO: 285302 - DNA, 20 bp, synthetic construct
  source 1..20: mol_type = other DNA
aaacagcaatcccaggaaca

SEQ ID NO: 285303 - DNA, 20 bp, synthetic construct
  source 1..20: mol_type = other DNA
aaaacagcaatcccaggaac

SEQ ID NO: 285304 - DNA, 20 bp, synthetic construct
  source 1..20: mol_type = other DNA
gaaaacagcaatcccaggaa

SEQ ID NO: 285305 - DNA, 20 bp, synthetic construct
  source 1..20: mol_type = other DNA
tgaaaacagcaatcccagga

SEQ ID NO: 285306 - DNA, 20 bp, synthetic construct
  source 1..20: mol_type = other DNA
ctgaaaacagcaatcccagg

SEQ ID NO: 285307 - DNA, 20 bp, synthetic construct
  source 1..20: mol_type = other DNA
gctgaaaacagcaatcccag

SEQ ID NO: 285308 - DNA, 20 bp, synthetic construct
  source 1..20: mol_type = other DNA
agctgaaaacagcaatccca

SEQ ID NO: 285309 - DNA, 20 bp, synthetic construct
  source 1..20: mol_type = other DNA
cagctgaaaacagcaatccc

SEQ ID NO: 285310 - DNA, 20 bp, synthetic construct
  source 1..20: mol_type = other DNA
acagctgaaaacagcaatcc

SEQ ID NO: 285311 - DNA, 20 bp, synthetic construct
  source 1..20: mol_type = other DNA
aacagctgaaaacagcaatc

SEQ ID NO: 285312 - DNA, 20 bp, synthetic construct
  source 1..20: mol_type = other DNA
aaacagctgaaaacagcaat

SEQ ID NO: 285313 - DNA, 20 bp, synthetic construct
  source 1..20: mol_type = other DNA
caaacagctgaaaacagcaa

SEQ ID NO: 285314 - DNA, 20 bp, synthetic construct
  source 1..20: mol_type = other DNA
tcaaacagctgaaaacagca

SEQ ID NO: 285315 - DNA, 20 bp, synthetic construct
  source 1..20: mol_type = other DNA
ctcaaacagctgaaaacagc

SEQ ID NO: 285316 - DNA, 20 bp, synthetic construct
  source 1..20: mol_type = other DNA
gctcaaacagctgaaaacag

SEQ ID NO: 285317 - DNA, 20 bp, synthetic construct
  source 1..20: mol_type = other DNA
agctcaaacagctgaaaaca

SEQ ID NO: 285318 - DNA, 20 bp, synthetic construct
  source 1..20: mol_type = other DNA
aagctcaaacagctgaaaac

SEQ ID NO: 285319 - DNA, 20 bp, synthetic construct
  source 1..20: mol_type = other DNA
aaagctcaaacagctgaaaa

SEQ ID NO: 285320 - DNA, 20 bp, synthetic construct
  source 1..20: mol_type = other DNA
caaagctcaaacagctgaaa

SEQ ID NO: 285321 - DNA, 20 bp, synthetic construct
  source 1..20: mol_type = other DNA
tcaaagctcaaacagctgaa

SEQ ID NO: 285322 - DNA, 20 bp, synthetic construct
  source 1..20: mol_type = other DNA
atcaaagctcaaacagctga

SEQ ID NO: 285323 - DNA, 20 bp, synthetic construct
  source 1..20: mol_type = other DNA
gatcaaagctcaaacagctg

SEQ ID NO: 285324 - DNA, 20 bp, synthetic construct
  source 1..20: mol_type = other DNA
ggatcaaagctcaaacagct

SEQ ID NO: 285325 - DNA, 20 bp, synthetic construct
  source 1..20: mol_type = other DNA
aggatcaaagctcaaacagc

SEQ ID NO: 285326 - DNA, 20 bp, synthetic construct
  source 1..20: mol_type = other DNA
caggatcaaagctcaaacag

SEQ ID NO: 285327 - DNA, 20 bp, synthetic construct
  source 1..20: mol_type = other DNA
ccaggatcaaagctcaaaca

SEQ ID NO: 285328 - DNA, 20 bp, synthetic construct
  source 1..20: mol_type = other DNA
accaggatcaaagctcaaac

SEQ ID NO: 285329 - DNA, 20 bp, synthetic construct
  source 1..20: mol_type = other DNA
aaccaggatcaaagctcaaa

SEQ ID NO: 285330 - DNA, 20 bp, synthetic construct
  source 1..20: mol_type = other DNA
gaaccaggatcaaagctcaa

SEQ ID NO: 285331 - DNA, 20 bp, synthetic construct
  source 1..20: mol_type = other DNA
agaaccaggatcaaagctca

SEQ ID NO: 285332 - DNA, 20 bp, synthetic construct
  source 1..20: mol_type = other DNA
gagaaccaggatcaaagctc

SEQ ID NO: 285333 - DNA, 20 bp, synthetic construct
  source 1..20: mol_type = other DNA
agagaaccaggatcaaagct

SEQ ID NO: 285334 - DNA, 20 bp, synthetic construct
  source 1..20: mol_type = other DNA
cagagaaccaggatcaaagc

SEQ ID NO: 285335 - DNA, 20 bp, synthetic construct
  source 1..20: mol_type = other DNA
ccagagaaccaggatcaaag

SEQ ID NO: 285336 - DNA, 20 bp, synthetic construct
  source 1..20: mol_type = other DNA
gccagagaaccaggatcaaa

SEQ ID NO: 285337 - DNA, 20 bp, synthetic construct
  source 1..20: mol_type = other DNA
agccagagaaccaggatcaa

SEQ ID NO: 285338 - DNA, 20 bp, synthetic construct
  source 1..20: mol_type = other DNA
aagccagagaaccaggatca

SEQ ID NO: 285339 - DNA, 20 bp, synthetic construct
  source 1..20: mol_type = other DNA
gaagccagagaaccaggatc

SEQ ID NO: 285340 - DNA, 20 bp, synthetic construct
  source 1..20: mol_type = other DNA
ggaagccagagaaccaggat

SEQ ID NO: 285341 - DNA, 20 bp, synthetic construct
  source 1..20: mol_type = other DNA
aggaagccagagaaccagga

SEQ ID NO: 285342 - DNA, 20 bp, synthetic construct
  source 1..20: mol_type = other DNA
gaggaagccagagaaccagg

SEQ ID NO: 285343 - DNA, 20 bp, synthetic construct
  source 1..20: mol_type = other DNA
tgaggaagccagagaaccag

SEQ ID NO: 285344 - DNA, 20 bp, synthetic construct
  source 1..20: mol_type = other DNA
ttgaggaagccagagaacca

SEQ ID NO: 285345 - DNA, 20 bp, synthetic construct
  source 1..20: mol_type = other DNA
tttgaggaagccagagaacc

SEQ ID NO: 285346 - DNA, 20 bp, synthetic construct
  source 1..20: mol_type = other DNA
ctttgaggaagccagagaac

SEQ ID NO: 285347 - DNA, 20 bp, synthetic construct
  source 1..20: mol_type = other DNA
actttgaggaagccagagaa

SEQ ID NO: 285348 - DNA, 20 bp, synthetic construct
  source 1..20: mol_type = other DNA
cactttgaggaagccagaga

SEQ ID NO: 285349 - DNA, 20 bp, synthetic construct
  source 1..20: mol_type = other DNA
tcactttgaggaagccagag

SEQ ID NO: 285350 - DNA, 20 bp, synthetic construct
  source 1..20: mol_type = other DNA
ctcactttgaggaagccaga

SEQ ID NO: 285351 - DNA, 20 bp, synthetic construct
  source 1..20: mol_type = other DNA
gctcactttgaggaagccag

SEQ ID NO: 285352 - DNA, 20 bp, synthetic construct
  source 1..20: mol_type = other DNA
agctcactttgaggaagcca

SEQ ID NO: 285353 - DNA, 20 bp, synthetic construct
  source 1..20: mol_type = other DNA
gagctcactttgaggaagcc

SEQ ID NO: 285354 - DNA, 20 bp, synthetic construct
  source 1..20: mol_type = other DNA
cgagctcactttgaggaagc

SEQ ID NO: 285355 - DNA, 20 bp, synthetic construct
  source 1..20: mol_type = other DNA
ccgagctcactttgaggaag

SEQ ID NO: 285356 - DNA, 20 bp, synthetic construct
  source 1..20: mol_type = other DNA
gccgagctcactttgaggaa

SEQ ID NO: 285357 - DNA, 20 bp, synthetic construct
  source 1..20: mol_type = other DNA
ggccgagctcactttgagga

SEQ ID NO: 285358 - DNA, 20 bp, synthetic construct
  source 1..20: mol_type = other DNA
tggccgagctcactttgagg

SEQ ID NO: 285359 - DNA, 20 bp, synthetic construct
  source 1..20: mol_type = other DNA
ctggccgagctcactttgag

SEQ ID NO: 285360 - DNA, 20 bp, synthetic construct
  source 1..20: mol_type = other DNA
tctggccgagctcactttga

SEQ ID NO: 285361 - DNA, 20 bp, synthetic construct
  source 1..20: mol_type = other DNA
ctctggccgagctcactttg

SEQ ID NO: 285362 - DNA, 20 bp, synthetic construct
  source 1..20: mol_type = other DNA
cctctggccgagctcacttt

SEQ ID NO: 285363 - DNA, 20 bp, synthetic construct
  source 1..20: mol_type = other DNA
tcctctggccgagctcactt

SEQ ID NO: 285364 - DNA, 20 bp, synthetic construct
  source 1..20: mol_type = other DNA
ctcctctggccgagctcact

SEQ ID NO: 285365 - DNA, 20 bp, synthetic construct
  source 1..20: mol_type = other DNA
cctcctctggccgagctcac

SEQ ID NO: 285366 - DNA, 20 bp, synthetic construct
  source 1..20: mol_type = other DNA
tcctcctctggccgagctca

SEQ ID NO: 285367 - DNA, 20 bp, synthetic construct
  source 1..20: mol_type = other DNA
ttcctcctctggccgagctc

SEQ ID NO: 285368 - DNA, 20 bp, synthetic construct
  source 1..20: mol_type = other DNA
cttcctcctctggccgagct

SEQ ID NO: 285369 - DNA, 20 bp, synthetic construct
  source 1..20: mol_type = other DNA
ccttcctcctctggccgagc

SEQ ID NO: 285370 - DNA, 20 bp, synthetic construct
  source 1..20: mol_type = other DNA
gccttcctcctctggccgag

SEQ ID NO: 285371 - DNA, 20 bp, synthetic construct
  source 1..20: mol_type = other DNA
ggccttcctcctctggccga

SEQ ID NO: 285372 - DNA, 20 bp, synthetic construct
  source 1..20: mol_type = other DNA
tggccttcctcctctggccg

SEQ ID NO: 285373 - DNA, 20 bp, synthetic construct
  source 1..20: mol_type = other DNA
atggccttcctcctctggcc

SEQ ID NO: 285374 - DNA, 20 bp, synthetic construct
  source 1..20: mol_type = other DNA
catggccttcctcctctggc

SEQ ID NO: 285375 - DNA, 20 bp, synthetic construct
  source 1..20: mol_type = other DNA
acatggccttcctcctctgg

SEQ ID NO: 285376 - DNA, 20 bp, synthetic construct
  source 1..20: mol_type = other DNA
cacatggccttcctcctctg

SEQ ID NO: 285377 - DNA, 20 bp, synthetic construct
  source 1..20: mol_type = other DNA
gcacatggccttcctcctct

SEQ ID NO: 285378 - DNA, 20 bp, synthetic construct
  source 1..20: mol_type = other DNA
agcacatggccttcctcctc

SEQ ID NO: 285379 - DNA, 20 bp, synthetic construct
  source 1..20: mol_type = other DNA
aagcacatggccttcctcct

SEQ ID NO: 285380 - DNA, 20 bp, synthetic construct
  source 1..20: mol_type = other DNA
aaagcacatggccttcctcc

SEQ ID NO: 285381 - DNA, 20 bp, synthetic construct
  source 1..20: mol_type = other DNA
gaaagcacatggccttcctc

SEQ ID NO: 285382 - DNA, 20 bp, synthetic construct
  source 1..20: mol_type = other DNA
agaaagcacatggccttcct

SEQ ID NO: 285383 - DNA, 20 bp, synthetic construct
  source 1..20: mol_type = other DNA
cagaaagcacatggccttcc

SEQ ID NO: 285384 - DNA, 20 bp, synthetic construct
  source 1..20: mol_type = other DNA
ccagaaagcacatggccttc

SEQ ID NO: 285385 - DNA, 20 bp, synthetic construct
  source 1..20: mol_type = other DNA
accagaaagcacatggcctt

SEQ ID NO: 285386 - DNA, 20 bp, synthetic construct
  source 1..20: mol_type = other DNA
aaccagaaagcacatggcct

SEQ ID NO: 285387 - DNA, 20 bp, synthetic construct
  source 1..20: mol_type = other DNA
caaccagaaagcacatggcc

SEQ ID NO: 285388 - DNA, 20 bp, synthetic construct
  source 1..20: mol_type = other DNA
tcaaccagaaagcacatggc

SEQ ID NO: 285389 - DNA, 20 bp, synthetic construct
  source 1..20: mol_type = other DNA
ttcaaccagaaagcacatgg

SEQ ID NO: 285390 - DNA, 20 bp, synthetic construct
  source 1..20: mol_type = other DNA
cttcaaccagaaagcacatg

SEQ ID NO: 285391 - DNA, 20 bp, synthetic construct
  source 1..20: mol_type = other DNA
acttcaaccagaaagcacat

SEQ ID NO: 285392 - DNA, 20 bp, synthetic construct
  source 1..20: mol_type = other DNA
gacttcaaccagaaagcaca

SEQ ID NO: 285393 - DNA, 20 bp, synthetic construct
  source 1..20: mol_type = other DNA
tgacttcaaccagaaagcac

SEQ ID NO: 285394 - DNA, 20 bp, synthetic construct
  source 1..20: mol_type = other DNA
ttgacttcaaccagaaagca

SEQ ID NO: 285395 - DNA, 20 bp, synthetic construct
  source 1..20: mol_type = other DNA
cttgacttcaaccagaaagc

SEQ ID NO: 285396 - DNA, 20 bp, synthetic construct
  source 1..20: mol_type = other DNA
acttgacttcaaccagaaag

SEQ ID NO: 285397 - DNA, 20 bp, synthetic construct
  source 1..20: mol_type = other DNA
gacttgacttcaaccagaaa

SEQ ID NO: 285398 - DNA, 20 bp, synthetic construct
  source 1..20: mol_type = other DNA
agacttgacttcaaccagaa

SEQ ID NO: 285399 - DNA, 20 bp, synthetic construct
  source 1..20: mol_type = other DNA
cagacttgacttcaaccaga

SEQ ID NO: 285400 - DNA, 20 bp, synthetic construct
  source 1..20: mol_type = other DNA
ccagacttgacttcaaccag

SEQ ID NO: 285401 - DNA, 20 bp, synthetic construct
  source 1..20: mol_type = other DNA
accagacttgacttcaacca

SEQ ID NO: 285402 - DNA, 20 bp, synthetic construct
  source 1..20: mol_type = other DNA
caccagacttgacttcaacc

SEQ ID NO: 285403 - DNA, 20 bp, synthetic construct
  source 1..20: mol_type = other DNA
gcaccagacttgacttcaac

SEQ ID NO: 285404 - DNA, 20 bp, synthetic construct
  source 1..20: mol_type = other DNA
ggcaccagacttgacttcaa

SEQ ID NO: 285405 - DNA, 20 bp, synthetic construct
  source 1..20: mol_type = other DNA
gggcaccagacttgacttca

SEQ ID NO: 285406 - DNA, 20 bp, synthetic construct
  source 1..20: mol_type = other DNA
agggcaccagacttgacttc

SEQ ID NO: 285407 - DNA, 20 bp, synthetic construct
  source 1..20: mol_type = other DNA
cagggcaccagacttgactt

SEQ ID NO: 285408 - DNA, 20 bp, synthetic construct
  source 1..20: mol_type = other DNA
ccagggcaccagacttgact

SEQ ID NO: 285409 - DNA, 20 bp, synthetic construct
  source 1..20: mol_type = other DNA
accagggcaccagacttgac

SEQ ID NO: 285410 - DNA, 20 bp, synthetic construct
  source 1..20: mol_type = other DNA
caccagggcaccagacttga

SEQ ID NO: 285411 - DNA, 20 bp, synthetic construct
  source 1..20: mol_type = other DNA
ccaccagggcaccagacttg

SEQ ID NO: 285412 - DNA, 20 bp, synthetic construct
  source 1..20: mol_type = other DNA
tccaccagggcaccagactt

SEQ ID NO: 285413 - DNA, 20 bp, synthetic construct
  source 1..20: mol_type = other DNA
ctccaccagggcaccagact

SEQ ID NO: 285414 - DNA, 20 bp, synthetic construct
  source 1..20: mol_type = other DNA
cctccaccagggcaccagac

SEQ ID NO: 285415 - DNA, 20 bp, synthetic construct
  source 1..20: mol_type = other DNA
gcctccaccagggcaccaga

SEQ ID NO: 285416 - DNA, 20 bp, synthetic construct
  source 1..20: mol_type = other DNA
agcctccaccagggcaccag

SEQ ID NO: 285417 - DNA, 20 bp, synthetic construct
  source 1..20: mol_type = other DNA
cagcctccaccagggcacca

SEQ ID NO: 285418 - DNA, 20 bp, synthetic construct
  source 1..20: mol_type = other DNA
acagcctccaccagggcacc

SEQ ID NO: 285419 - DNA, 20 bp, synthetic construct
  source 1..20: mol_type = other DNA
cacagcctccaccagggcac

SEQ ID NO: 285420 - DNA, 20 bp, synthetic construct
  source 1..20: mol_type = other DNA
gcacagcctccaccagggca

SEQ ID NO: 285421 - DNA, 20 bp, synthetic construct
  source 1..20: mol_type = other DNA
agcacagcctccaccagggc

SEQ ID NO: 285422 - DNA, 20 bp, synthetic construct
  source 1..20: mol_type = other DNA
cagcacagcctccaccaggg

SEQ ID NO: 285423 - DNA, 20 bp, synthetic construct
  source 1..20: mol_type = other DNA
gcagcacagcctccaccagg

SEQ ID NO: 285424 - DNA, 20 bp, synthetic construct
  source 1..20: mol_type = other DNA
agcagcacagcctccaccag

SEQ ID NO: 285425 - DNA, 20 bp, synthetic construct
  source 1..20: mol_type = other DNA
cagcagcacagcctccacca

SEQ ID NO: 285426 - DNA, 20 bp, synthetic construct
  source 1..20: mol_type = other DNA
tcagcagcacagcctccacc

SEQ ID NO: 285427 - DNA, 20 bp, synthetic construct
  source 1..20: mol_type = other DNA
ctcagcagcacagcctccac

SEQ ID NO: 285428 - DNA, 20 bp, synthetic construct
  source 1..20: mol_type = other DNA
cctcagcagcacagcctcca

SEQ ID NO: 285429 - DNA, 20 bp, synthetic construct
  source 1..20: mol_type = other DNA
gcctcagcagcacagcctcc

SEQ ID NO: 285430 - DNA, 20 bp, synthetic construct
  source 1..20: mol_type = other DNA
cgcctcagcagcacagcctc

SEQ ID NO: 285431 - DNA, 20 bp, synthetic construct
  source 1..20: mol_type = other DNA
ccgcctcagcagcacagcct

SEQ ID NO: 285432 - DNA, 20 bp, synthetic construct
  source 1..20: mol_type = other DNA
tccgcctcagcagcacagcc

SEQ ID NO: 285433 - DNA, 20 bp, synthetic construct
  source 1..20: mol_type = other DNA
ctccgcctcagcagcacagc

SEQ ID NO: 285434 - DNA, 20 bp, synthetic construct
  source 1..20: mol_type = other DNA
gctccgcctcagcagcacag

SEQ ID NO: 285435 - DNA, 20 bp, synthetic construct
  source 1..20: mol_type = other DNA
agctccgcctcagcagcaca

SEQ ID NO: 285436 - DNA, 20 bp, synthetic construct
  source 1..20: mol_type = other DNA
cagctccgcctcagcagcac

SEQ ID NO: 285437 - DNA, 20 bp, synthetic construct
  source 1..20: mol_type = other DNA
ccagctccgcctcagcagca

SEQ ID NO: 285438 - DNA, 20 bp, synthetic construct
  source 1..20: mol_type = other DNA
cccagctccgcctcagcagc

SEQ ID NO: 285439 - DNA, 20 bp, synthetic construct
  source 1..20: mol_type = other DNA
ccccagctccgcctcagcag

SEQ ID NO: 285440 - DNA, 20 bp, synthetic construct
  source 1..20: mol_type = other DNA
tccccagctccgcctcagca

SEQ ID NO: 285441 - DNA, 20 bp, synthetic construct
  source 1..20: mol_type = other DNA
ctccccagctccgcctcagc

SEQ ID NO: 285442 - DNA, 20 bp, synthetic construct
  source 1..20: mol_type = other DNA
tctccccagctccgcctcag

SEQ ID NO: 285443 - DNA, 20 bp, synthetic construct
  source 1..20: mol_type = other DNA
ctctccccagctccgcctca

SEQ ID NO: 285444 - DNA, 20 bp, synthetic construct
  source 1..20: mol_type = other DNA
tctctccccagctccgcctc

SEQ ID NO: 285445 - DNA, 20 bp, synthetic construct
  source 1..20: mol_type = other DNA
ctctctccccagctccgcct

SEQ ID NO: 285446 - DNA, 20 bp, synthetic construct
  source 1..20: mol_type = other DNA
actctctccccagctccgcc

SEQ ID NO: 285447 - DNA, 20 bp, synthetic construct
  source 1..20: mol_type = other DNA
cactctctccccagctccgc

SEQ ID NO: 285448 - DNA, 20 bp, synthetic construct
  source 1..20: mol_type = other DNA
gcactctctccccagctccg

SEQ ID NO: 285449 - DNA, 20 bp, synthetic construct
  source 1..20: mol_type = other DNA
tgcactctctccccagctcc

SEQ ID NO: 285450 - DNA, 20 bp, synthetic construct
  source 1..20: mol_type = other DNA
gtgcactctctccccagctc

SEQ ID NO: 285451 - DNA, 20 bp, synthetic construct
  source 1..20: mol_type = other DNA
tgtgcactctctccccagct

SEQ ID NO: 285452 - DNA, 20 bp, synthetic construct
  source 1..20: mol_type = other DNA
gtgtgcactctctccccagc

SEQ ID NO: 285453 - DNA, 20 bp, synthetic construct
  source 1..20: mol_type = other DNA
cgtgtgcactctctccccag

SEQ ID NO: 285454 - DNA, 20 bp, synthetic construct
  source 1..20: mol_type = other DNA
ccgtgtgcactctctcccca

SEQ ID NO: 285455 - DNA, 20 bp, synthetic construct
  source 1..20: mol_type = other DNA
cccgtgtgcactctctcccc

SEQ ID NO: 285456 - DNA, 20 bp, synthetic construct
  source 1..20: mol_type = other DNA
gcccgtgtgcactctctccc

SEQ ID NO: 285457 - DNA, 20 bp, synthetic construct
  source 1..20: mol_type = other DNA
agcccgtgtgcactctctcc

SEQ ID NO: 285458 - DNA, 20 bp, synthetic construct
  source 1..20: mol_type = other DNA
cagcccgtgtgcactctctc

SEQ ID NO: 285459 - DNA, 20 bp, synthetic construct
  source 1..20: mol_type = other DNA
gcagcccgtgtgcactctct

SEQ ID NO: 285460 - DNA, 20 bp, synthetic construct
  source 1..20: mol_type = other DNA
cgcagcccgtgtgcactctc

SEQ ID NO: 285461 - DNA, 20 bp, synthetic construct
  source 1..20: mol_type = other DNA
acgcagcccgtgtgcactct

SEQ ID NO: 285462 - DNA, 20 bp, synthetic construct
  source 1..20: mol_type = other DNA
cacgcagcccgtgtgcactc

SEQ ID NO: 285463 - DNA, 20 bp, synthetic construct
  source 1..20: mol_type = other DNA
ccacgcagcccgtgtgcact

SEQ ID NO: 285464 - DNA, 20 bp, synthetic construct
  source 1..20: mol_type = other DNA
gccacgcagcccgtgtgcac

SEQ ID NO: 285465 - DNA, 20 bp, synthetic construct
  source 1..20: mol_type = other DNA
ggccacgcagcccgtgtgca

SEQ ID NO: 285466 - DNA, 20 bp, synthetic construct
  source 1..20: mol_type = other DNA
tggccacgcagcccgtgtgc

SEQ ID NO: 285467 - DNA, 20 bp, synthetic construct
  source 1..20: mol_type = other DNA
ttggccacgcagcccgtgtg

SEQ ID NO: 285468 - DNA, 20 bp, synthetic construct
  source 1..20: mol_type = other DNA
gttggccacgcagcccgtgt

SEQ ID NO: 285469 - DNA, 20 bp, synthetic construct
  source 1..20: mol_type = other DNA
ggttggccacgcagcccgtg

SEQ ID NO: 285470 - DNA, 20 bp, synthetic construct
  source 1..20: mol_type = other DNA
gggttggccacgcagcccgt

SEQ ID NO: 285471 - DNA, 20 bp, synthetic construct
  source 1..20: mol_type = other DNA
ggggttggccacgcagcccg

SEQ ID NO: 285472 - DNA, 20 bp, synthetic construct
  source 1..20: mol_type = other DNA
aggggttggccacgcagccc

SEQ ID NO: 285473 - DNA, 20 bp, synthetic construct
  source 1..20: mol_type = other DNA
gaggggttggccacgcagcc

SEQ ID NO: 285474 - DNA, 20 bp, synthetic construct
  source 1..20: mol_type = other DNA
agaggggttggccacgcagc

SEQ ID NO: 285475 - DNA, 20 bp, synthetic construct
  source 1..20: mol_type = other DNA
cagaggggttggccacgcag

SEQ ID NO: 285476 - DNA, 20 bp, synthetic construct
  source 1..20: mol_type = other DNA
ccagaggggttggccacgca

SEQ ID NO: 285477 - DNA, 20 bp, synthetic construct
  source 1..20: mol_type = other DNA
cccagaggggttggccacgc

SEQ ID NO: 285478 - DNA, 20 bp, synthetic construct
  source 1..20: mol_type = other DNA
acccagaggggttggccacg

SEQ ID NO: 285479 - DNA, 20 bp, synthetic construct
  source 1..20: mol_type = other DNA
tacccagaggggttggccac

SEQ ID NO: 285480 - DNA, 20 bp, synthetic construct
  source 1..20: mol_type = other DNA
ctacccagaggggttggcca

SEQ ID NO: 285481 - DNA, 20 bp, synthetic construct
  source 1..20: mol_type = other DNA
gctacccagaggggttggcc

SEQ ID NO: 285482 - DNA, 20 bp, synthetic construct
  source 1..20: mol_type = other DNA
agctacccagaggggttggc

SEQ ID NO: 285483 - DNA, 20 bp, synthetic construct
  source 1..20: mol_type = other DNA
cagctacccagaggggttgg

SEQ ID NO: 285484 - DNA, 20 bp, synthetic construct
  source 1..20: mol_type = other DNA
tcagctacccagaggggttg

SEQ ID NO: 285485 - DNA, 20 bp, synthetic construct
  source 1..20: mol_type = other DNA
atcagctacccagaggggtt

SEQ ID NO: 285486 - DNA, 20 bp, synthetic construct
  source 1..20: mol_type = other DNA
catcagctacccagaggggt

SEQ ID NO: 285487 - DNA, 20 bp, synthetic construct
  source 1..20: mol_type = other DNA
gcatcagctacccagagggg

SEQ ID NO: 285488 - DNA, 20 bp, synthetic construct
  source 1..20: mol_type = other DNA
ggcatcagctacccagaggg

SEQ ID NO: 285489 - DNA, 20 bp, synthetic construct
  source 1..20: mol_type = other DNA
gggcatcagctacccagagg

SEQ ID NO: 285490 - DNA, 20 bp, synthetic construct
  source 1..20: mol_type = other DNA
tgggcatcagctacccagag

SEQ ID NO: 285491 - DNA, 20 bp, synthetic construct
  source 1..20: mol_type = other DNA
ttgggcatcagctacccaga

SEQ ID NO: 285492 - DNA, 20 bp, synthetic construct
  source 1..20: mol_type = other DNA
tttgggcatcagctacccag

SEQ ID NO: 285493 - DNA, 20 bp, synthetic construct
  source 1..20: mol_type = other DNA
ctttgggcatcagctaccca

SEQ ID NO: 285494 - DNA, 20 bp, synthetic construct
  source 1..20: mol_type = other DNA
tctttgggcatcagctaccc

SEQ ID NO: 285495 - DNA, 20 bp, synthetic construct
  source 1..20: mol_type = other DNA
gtctttgggcatcagctacc

SEQ ID NO: 285496 - DNA, 20 bp, synthetic construct
  source 1..20: mol_type = other DNA
cgtctttgggcatcagctac

SEQ ID NO: 285497 - DNA, 20 bp, synthetic construct
  source 1..20: mol_type = other DNA
gcgtctttgggcatcagcta

SEQ ID NO: 285498 - DNA, 20 bp, synthetic construct
  source 1..20: mol_type = other DNA
agcgtctttgggcatcagct

SEQ ID NO: 285499 - DNA, 20 bp, synthetic construct
  source 1..20: mol_type = other DNA
cagcgtctttgggcatcagc

SEQ ID NO: 285500 - DNA, 20 bp, synthetic construct
  source 1..20: mol_type = other DNA
gcagcgtctttgggcatcag

SEQ ID NO: 285501 - DNA, 20 bp, synthetic construct
  source 1..20: mol_type = other DNA
tgcagcgtctttgggcatca

SEQ ID NO: 285502 - DNA, 20 bp, synthetic construct
  source 1..20: mol_type = other DNA
ctgcagcgtctttgggcatc

SEQ ID NO: 285503 - DNA, 20 bp, synthetic construct
  source 1..20: mol_type = other DNA
actgcagcgtctttgggcat

SEQ ID NO: 285504 - DNA, 20 bp, synthetic construct
  source 1..20: mol_type = other DNA
cactgcagcgtctttgggca

SEQ ID NO: 285505 - DNA, 20 bp, synthetic construct
  source 1..20: mol_type = other DNA
gcactgcagcgtctttgggc

SEQ ID NO: 285506 - DNA, 20 bp, synthetic construct
  source 1..20: mol_type = other DNA
ggcactgcagcgtctttggg

SEQ ID NO: 285507 - DNA, 20 bp, synthetic construct
  source 1..20: mol_type = other DNA
gggcactgcagcgtctttgg

SEQ ID NO: 285508 - DNA, 20 bp, synthetic construct
  source 1..20: mol_type = other DNA
tgggcactgcagcgtctttg

SEQ ID NO: 285509 - DNA, 20 bp, synthetic construct
  source 1..20: mol_type = other DNA
ctgggcactgcagcgtcttt

SEQ ID NO: 285510 - DNA, 20 bp, synthetic construct
  source 1..20: mol_type = other DNA
cctgggcactgcagcgtctt

SEQ ID NO: 285511 - DNA, 20 bp, synthetic construct
  source 1..20: mol_type = other DNA
tcctgggcactgcagcgtct

SEQ ID NO: 285512 - DNA, 20 bp, synthetic construct
  source 1..20: mol_type = other DNA
gtcctgggcactgcagcgtc

SEQ ID NO: 285513 - DNA, 20 bp, synthetic construct
  source 1..20: mol_type = other DNA
tgtcctgggcactgcagcgt

SEQ ID NO: 285514 - DNA, 20 bp, synthetic construct
  source 1..20: mol_type = other DNA
atgtcctgggcactgcagcg

SEQ ID NO: 285515 - DNA, 20 bp, synthetic construct
  source 1..20: mol_type = other DNA
gatgtcctgggcactgcagc

SEQ ID NO: 285516 - DNA, 20 bp, synthetic construct
  source 1..20: mol_type = other DNA
agatgtcctgggcactgcag

SEQ ID NO: 285517 - DNA, 20 bp, synthetic construct
  source 1..20: mol_type = other DNA
cagatgtcctgggcactgca

SEQ ID NO: 285518 - DNA, 20 bp, synthetic construct
  source 1..20: mol_type = other DNA
ccagatgtcctgggcactgc

SEQ ID NO: 285519 - DNA, 20 bp, synthetic construct
  source 1..20: mol_type = other DNA
cccagatgtcctgggcactg

SEQ ID NO: 285520 - DNA, 20 bp, synthetic construct
  source 1..20: mol_type = other DNA
tcccagatgtcctgggcact

SEQ ID NO: 285521 - DNA, 20 bp, synthetic construct
  source 1..20: mol_type = other DNA
gtcccagatgtcctgggcac

SEQ ID NO: 285522 - DNA, 20 bp, synthetic construct
  source 1..20: mol_type = other DNA
ggtcccagatgtcctgggca

SEQ ID NO: 285523 - DNA, 20 bp, synthetic construct
  source 1..20: mol_type = other DNA
aggtcccagatgtcctgggc

SEQ ID NO: 285524 - DNA, 20 bp, synthetic construct
  source 1..20: mol_type = other DNA
gaggtcccagatgtcctggg

SEQ ID NO: 285525 - DNA, 20 bp, synthetic construct
  source 1..20: mol_type = other DNA
ggaggtcccagatgtcctgg

SEQ ID NO: 285526 - DNA, 20 bp, synthetic construct
  source 1..20: mol_type = other DNA
gggaggtcccagatgtcctg

SEQ ID NO: 285527 - DNA, 20 bp, synthetic construct
  source 1..20: mol_type = other DNA
agggaggtcccagatgtcct

SEQ ID NO: 285528 - DNA, 20 bp, synthetic construct
  source 1..20: mol_type = other DNA
cagggaggtcccagatgtcc

SEQ ID NO: 285529 - DNA, 20 bp, synthetic construct
  source 1..20: mol_type = other DNA
ccagggaggtcccagatgtc

SEQ ID NO: 285530 - DNA, 20 bp, synthetic construct
  source 1..20: mol_type = other DNA
cccagggaggtcccagatgt

SEQ ID NO: 285531 - DNA, 20 bp, synthetic construct
  source 1..20: mol_type = other DNA
ccccagggaggtcccagatg

SEQ ID NO: 285532 - DNA, 20 bp, synthetic construct
  source 1..20: mol_type = other DNA
gccccagggaggtcccagat

SEQ ID NO: 285533 - DNA, 20 bp, synthetic construct
  source 1..20: mol_type = other DNA
ggccccagggaggtcccaga

SEQ ID NO: 285534 - DNA, 20 bp, synthetic construct
  source 1..20: mol_type = other DNA
gggccccagggaggtcccag

SEQ ID NO: 285535 - DNA, 20 bp, synthetic construct
  source 1..20: mol_type = other DNA
cgggccccagggaggtccca

SEQ ID NO: 285536 - DNA, 20 bp, synthetic construct
  source 1..20: mol_type = other DNA
gcgggccccagggaggtccc

SEQ ID NO: 285537 - DNA, 20 bp, synthetic construct
  source 1..20: mol_type = other DNA
ggcgggccccagggaggtcc

SEQ ID NO: 285538 - DNA, 20 bp, synthetic construct
  source 1..20: mol_type = other DNA
gggcgggccccagggaggtc

SEQ ID NO: 285539 - DNA, 20 bp, synthetic construct
  source 1..20: mol_type = other DNA
cgggcgggccccagggaggt

SEQ ID NO: 285540 - DNA, 20 bp, synthetic construct
  source 1..20: mol_type = other DNA
acgggcgggccccagggagg

SEQ ID NO: 285541 - DNA, 20 bp, synthetic construct
  source 1..20: mol_type = other DNA
cacgggcgggccccagggag

SEQ ID NO: 285542 - DNA, 20 bp, synthetic construct
  source 1..20: mol_type = other DNA
acacgggcgggccccaggga

SEQ ID NO: 285543 - DNA, 20 bp, synthetic construct
  source 1..20: mol_type = other DNA
cacacgggcgggccccaggg

SEQ ID NO: 285544 - DNA, 20 bp, synthetic construct
  source 1..20: mol_type = other DNA
acacacgggcgggccccagg

SEQ ID NO: 285545 - DNA, 20 bp, synthetic construct
  source 1..20: mol_type = other DNA
gacacacgggcgggccccag

SEQ ID NO: 285546 - DNA, 20 bp, synthetic construct
  source 1..20: mol_type = other DNA
ggacacacgggcgggcccca

SEQ ID NO: 285547 - DNA, 20 bp, synthetic construct
  source 1..20: mol_type = other DNA
gggacacacgggcgggcccc

SEQ ID NO: 285548 - DNA, 20 bp, synthetic construct
  source 1..20: mol_type = other DNA
cgggacacacgggcgggccc

SEQ ID NO: 285549 - DNA, 20 bp, synthetic construct
  source 1..20: mol_type = other DNA
gcgggacacacgggcgggcc

SEQ ID NO: 285550 - DNA, 20 bp, synthetic construct
  source 1..20: mol_type = other DNA
cgcgggacacacgggcgggc

SEQ ID NO: 285551 - DNA, 20 bp, synthetic construct
  source 1..20: mol_type = other DNA
gcgcgggacacacgggcggg

SEQ ID NO: 285552 - DNA, 20 bp, synthetic construct
  source 1..20: mol_type = other DNA
agcgcgggacacacgggcgg

SEQ ID NO: 285553 - DNA, 20 bp, synthetic construct
  source 1..20: mol_type = other DNA
cagcgcgggacacacgggcg

SEQ ID NO: 285554 - DNA, 20 bp, synthetic construct
  source 1..20: mol_type = other DNA
acagcgcgggacacacgggc

SEQ ID NO: 285555 - DNA, 20 bp, synthetic construct
  source 1..20: mol_type = other DNA
cacagcgcgggacacacggg

SEQ ID NO: 285556 - DNA, 20 bp, synthetic construct
  source 1..20: mol_type = other DNA
acacagcgcgggacacacgg

SEQ ID NO: 285557 - DNA, 20 bp, synthetic construct
  source 1..20: mol_type = other DNA
aacacagcgcgggacacacg

SEQ ID NO: 285558 - DNA, 20 bp, synthetic construct
  source 1..20: mol_type = other DNA
gaacacagcgcgggacacac

SEQ ID NO: 285559 - DNA, 20 bp, synthetic construct
  source 1..20: mol_type = other DNA
tgaacacagcgcgggacaca

SEQ ID NO: 285560 - DNA, 20 bp, synthetic construct
  source 1..20: mol_type = other DNA
atgaacacagcgcgggacac

SEQ ID NO: 285561 - DNA, 20 bp, synthetic construct
  source 1..20: mol_type = other DNA
gatgaacacagcgcgggaca

SEQ ID NO: 285562 - DNA, 20 bp, synthetic construct
  source 1..20: mol_type = other DNA
agatgaacacagcgcgggac

SEQ ID NO: 285563 - DNA, 20 bp, synthetic construct
  source 1..20: mol_type = other DNA
cagatgaacacagcgcggga

SEQ ID NO: 285564 - DNA, 20 bp, synthetic construct
  source 1..20: mol_type = other DNA
gcagatgaacacagcgcggg

SEQ ID NO: 285565 - DNA, 20 bp, synthetic construct
  source 1..20: mol_type = other DNA
cgcagatgaacacagcgcgg

SEQ ID NO: 285566 - DNA, 20 bp, synthetic construct
  source 1..20: mol_type = other DNA
ccgcagatgaacacagcgcg

SEQ ID NO: 285567 - DNA, 20 bp, synthetic construct
  source 1..20: mol_type = other DNA
cccgcagatgaacacagcgc

SEQ ID NO: 285568 - DNA, 20 bp, synthetic construct
  source 1..20: mol_type = other DNA
gcccgcagatgaacacagcg

SEQ ID NO: 285569 - DNA, 20 bp, synthetic construct
  source 1..20: mol_type = other DNA
agcccgcagatgaacacagc

SEQ ID NO: 285570 - DNA, 20 bp, synthetic construct
  source 1..20: mol_type = other DNA
tagcccgcagatgaacacag

SEQ ID NO: 285571 - DNA, 20 bp, synthetic construct
  source 1..20: mol_type = other DNA
ctagcccgcagatgaacaca

SEQ ID NO: 285572 - DNA, 20 bp, synthetic construct
  source 1..20: mol_type = other DNA
gctagcccgcagatgaacac

SEQ ID NO: 285573 - DNA, 20 bp, synthetic construct
  source 1..20: mol_type = other DNA
ggctagcccgcagatgaaca

SEQ ID NO: 285574 - DNA, 20 bp, synthetic construct
  source 1..20: mol_type = other DNA
aggctagcccgcagatgaac

SEQ ID NO: 285575 - DNA, 20 bp, synthetic construct
  source 1..20: mol_type = other DNA
caggctagcccgcagatgaa

SEQ ID NO: 285576 - DNA, 20 bp, synthetic construct
  source 1..20: mol_type = other DNA
acaggctagcccgcagatga

SEQ ID NO: 285577 - DNA, 20 bp, synthetic construct
  source 1..20: mol_type = other DNA
cacaggctagcccgcagatg

SEQ ID NO: 285578 - DNA, 20 bp, synthetic construct
  source 1..20: mol_type = other DNA
tcacaggctagcccgcagat

SEQ ID NO: 285579 - DNA, 20 bp, synthetic construct
  source 1..20: mol_type = other DNA
gtcacaggctagcccgcaga

SEQ ID NO: 285580 - DNA, 20 bp, synthetic construct
  source 1..20: mol_type = other DNA
ggtcacaggctagcccgcag

SEQ ID NO: 285581 - DNA, 20 bp, synthetic construct
  source 1..20: mol_type = other DNA
gggtcacaggctagcccgca

SEQ ID NO: 285582 - DNA, 20 bp, synthetic construct
  source 1..20: mol_type = other DNA
cgggtcacaggctagcccgc

SEQ ID NO: 285583 - DNA, 20 bp, synthetic construct
  source 1..20: mol_type = other DNA
gcgggtcacaggctagcccg

SEQ ID NO: 285584 - DNA, 20 bp, synthetic construct
  source 1..20: mol_type = other DNA
cgcgggtcacaggctagccc

SEQ ID NO: 285585 - DNA, 20 bp, synthetic construct
  source 1..20: mol_type = other DNA
gcgcgggtcacaggctagcc

SEQ ID NO: 285586 - DNA, 20 bp, synthetic construct
  source 1..20: mol_type = other DNA
agcgcgggtcacaggctagc

SEQ ID NO: 285587 - DNA, 20 bp, synthetic construct
  source 1..20: mol_type = other DNA
cagcgcgggtcacaggctag

SEQ ID NO: 285588 - DNA, 20 bp, synthetic construct
  source 1..20: mol_type = other DNA
acagcgcgggtcacaggcta

SEQ ID NO: 285589 - DNA, 20 bp, synthetic construct
  source 1..20: mol_type = other DNA
cacagcgcgggtcacaggct

SEQ ID NO: 285590 - DNA, 20 bp, synthetic construct
  source 1..20: mol_type = other DNA
gcacagcgcgggtcacaggc

SEQ ID NO: 285591 - DNA, 20 bp, synthetic construct
  source 1..20: mol_type = other DNA
agcacagcgcgggtcacagg

SEQ ID NO: 285592 - DNA, 20 bp, synthetic construct
  source 1..20: mol_type = other DNA
gagcacagcgcgggtcacag

SEQ ID NO: 285593 - DNA, 20 bp, synthetic construct
  source 1..20: mol_type = other DNA
cgagcacagcgcgggtcaca

SEQ ID NO: 285594 - DNA, 20 bp, synthetic construct
  source 1..20: mol_type = other DNA
acgagcacagcgcgggtcac

SEQ ID NO: 285595 - DNA, 20 bp, synthetic construct
  source 1..20: mol_type = other DNA
gacgagcacagcgcgggtca

SEQ ID NO: 285596 - DNA, 20 bp, synthetic construct
  source 1..20: mol_type = other DNA
agacgagcacagcgcgggtc

SEQ ID NO: 285597 - DNA, 20 bp, synthetic construct
  source 1..20: mol_type = other DNA
cagacgagcacagcgcgggt

SEQ ID NO: 285598 - DNA, 20 bp, synthetic construct
  source 1..20: mol_type = other DNA
gcagacgagcacagcgcggg

SEQ ID NO: 285599 - DNA, 20 bp, synthetic construct
  source 1..20: mol_type = other DNA
cgcagacgagcacagcgcgg

SEQ ID NO: 285600 - DNA, 20 bp, synthetic construct
  source 1..20: mol_type = other DNA
ccgcagacgagcacagcgcg

SEQ ID NO: 285601 - DNA, 20 bp, synthetic construct
  source 1..20: mol_type = other DNA
cccgcagacgagcacagcgc

SEQ ID NO: 285602 - DNA, 20 bp, synthetic construct
  source 1..20: mol_type = other DNA
gcccgcagacgagcacagcg

SEQ ID NO: 285603 - DNA, 20 bp, synthetic construct
  source 1..20: mol_type = other DNA
agcccgcagacgagcacagc

SEQ ID NO: 285604 - DNA, 20 bp, synthetic construct
  source 1..20: mol_type = other DNA
tagcccgcagacgagcacag

SEQ ID NO: 285605 - DNA, 20 bp, synthetic construct
  source 1..20: mol_type = other DNA
ctagcccgcagacgagcaca

SEQ ID NO: 285606 - DNA, 20 bp, synthetic construct
  source 1..20: mol_type = other DNA
gctagcccgcagacgagcac

SEQ ID NO: 285607 - DNA, 20 bp, synthetic construct
  source 1..20: mol_type = other DNA
ggctagcccgcagacgagca

SEQ ID NO: 285608 - DNA, 20 bp, synthetic construct
  source 1..20: mol_type = other DNA
aggctagcccgcagacgagc

SEQ ID NO: 285609 - DNA, 20 bp, synthetic construct
  source 1..20: mol_type = other DNA
caggctagcccgcagacgag

SEQ ID NO: 285610 - DNA, 20 bp, synthetic construct
  source 1..20: mol_type = other DNA
acaggctagcccgcagacga

SEQ ID NO: 285611 - DNA, 20 bp, synthetic construct
  source 1..20: mol_type = other DNA
cacaggctagcccgcagacg

SEQ ID NO: 285612 - DNA, 20 bp, synthetic construct
  source 1..20: mol_type = other DNA
acacaggctagcccgcagac

SEQ ID NO: 285613 - DNA, 20 bp, synthetic construct
  source 1..20: mol_type = other DNA
gacacaggctagcccgcaga

SEQ ID NO: 285614 - DNA, 20 bp, synthetic construct
  source 1..20: mol_type = other DNA
ggacacaggctagcccgcag

SEQ ID NO: 285615 - DNA, 20 bp, synthetic construct
  source 1..20: mol_type = other DNA
gggacacaggctagcccgca

SEQ ID NO: 285616 - DNA, 20 bp, synthetic construct
  source 1..20: mol_type = other DNA
cgggacacaggctagcccgc

SEQ ID NO: 285617 - DNA, 20 bp, synthetic construct
  source 1..20: mol_type = other DNA
gcgggacacaggctagcccg

SEQ ID NO: 285618 - DNA, 20 bp, synthetic construct
  source 1..20: mol_type = other DNA
cgcgggacacaggctagccc

SEQ ID NO: 285619 - DNA, 20 bp, synthetic construct
  source 1..20: mol_type = other DNA
gcgcgggacacaggctagcc

SEQ ID NO: 285620 - DNA, 20 bp, synthetic construct
  source 1..20: mol_type = other DNA
agcgcgggacacaggctagc

SEQ ID NO: 285621 - DNA, 20 bp, synthetic construct
  source 1..20: mol_type = other DNA
gagcgcgggacacaggctag

SEQ ID NO: 285622 - DNA, 20 bp, synthetic construct
  source 1..20: mol_type = other DNA
agagcgcgggacacaggcta

SEQ ID NO: 285623 - DNA, 20 bp, synthetic construct
  source 1..20: mol_type = other DNA
cagagcgcgggacacaggct

SEQ ID NO: 285624 - DNA, 20 bp, synthetic construct
  source 1..20: mol_type = other DNA
gcagagcgcgggacacaggc

SEQ ID NO: 285625 - DNA, 20 bp, synthetic construct
  source 1..20: mol_type = other DNA
agcagagcgcgggacacagg

SEQ ID NO: 285626 - DNA, 20 bp, synthetic construct
  source 1..20: mol_type = other DNA
aagcagagcgcgggacacag

SEQ ID NO: 285627 - DNA, 20 bp, synthetic construct
  source 1..20: mol_type = other DNA
caagcagagcgcgggacaca

SEQ ID NO: 285628 - DNA, 20 bp, synthetic construct
  source 1..20: mol_type = other DNA
acaagcagagcgcgggacac

SEQ ID NO: 285629 - DNA, 20 bp, synthetic construct
  source 1..20: mol_type = other DNA
gacaagcagagcgcgggaca

SEQ ID NO: 285630 - DNA, 20 bp, synthetic construct
  source 1..20: mol_type = other DNA
agacaagcagagcgcgggac

SEQ ID NO: 285631 - DNA, 20 bp, synthetic construct
  source 1..20: mol_type = other DNA
cagacaagcagagcgcggga

SEQ ID NO: 285632 - DNA, 20 bp, synthetic construct
  source 1..20: mol_type = other DNA
gcagacaagcagagcgcggg

SEQ ID NO: 285633 - DNA, 20 bp, synthetic construct
  source 1..20: mol_type = other DNA
cgcagacaagcagagcgcgg

SEQ ID NO: 285634 - DNA, 20 bp, synthetic construct
  source 1..20: mol_type = other DNA
ccgcagacaagcagagcgcg

SEQ ID NO: 285635 - DNA, 20 bp, synthetic construct
  source 1..20: mol_type = other DNA
accgcagacaagcagagcgc

SEQ ID NO: 285636 - DNA, 20 bp, synthetic construct
  source 1..20: mol_type = other DNA
gaccgcagacaagcagagcg

SEQ ID NO: 285637 - DNA, 20 bp, synthetic construct
  source 1..20: mol_type = other DNA
agaccgcagacaagcagagc

SEQ ID NO: 285638 - DNA, 20 bp, synthetic construct
  source 1..20: mol_type = other DNA
tagaccgcagacaagcagag

SEQ ID NO: 285639 - DNA, 20 bp, synthetic construct
  source 1..20: mol_type = other DNA
ctagaccgcagacaagcaga

SEQ ID NO: 285640 - DNA, 20 bp, synthetic construct
  source 1..20: mol_type = other DNA
gctagaccgcagacaagcag

SEQ ID NO: 285641 - DNA, 20 bp, synthetic construct
  source 1..20: mol_type = other DNA
ggctagaccgcagacaagca

SEQ ID NO: 285642 - DNA, 20 bp, synthetic construct
  source 1..20: mol_type = other DNA
aggctagaccgcagacaagc

SEQ ID NO: 285643 - DNA, 20 bp, synthetic construct
  source 1..20: mol_type = other DNA
caggctagaccgcagacaag

SEQ ID NO: 285644 - DNA, 20 bp, synthetic construct
  source 1..20: mol_type = other DNA
acaggctagaccgcagacaa

SEQ ID NO: 285645 - DNA, 20 bp, synthetic construct
  source 1..20: mol_type = other DNA
cacaggctagaccgcagaca

SEQ ID NO: 285646 - DNA, 20 bp, synthetic construct
  source 1..20: mol_type = other DNA
tcacaggctagaccgcagac

SEQ ID NO: 285647 - DNA, 20 bp, synthetic construct
  source 1..20: mol_type = other DNA
gtcacaggctagaccgcaga

SEQ ID NO: 285648 - DNA, 20 bp, synthetic construct
  source 1..20: mol_type = other DNA
ggtcacaggctagaccgcag

SEQ ID NO: 285649 - DNA, 20 bp, synthetic construct
  source 1..20: mol_type = other DNA
aggtcacaggctagaccgca

SEQ ID NO: 285650 - DNA, 20 bp, synthetic construct
  source 1..20: mol_type = other DNA
caggtcacaggctagaccgc

SEQ ID NO: 285651 - DNA, 20 bp, synthetic construct
  source 1..20: mol_type = other DNA
ccaggtcacaggctagaccg

SEQ ID NO: 285652 - DNA, 20 bp, synthetic construct
  source 1..20: mol_type = other DNA
gccaggtcacaggctagacc

SEQ ID NO: 285653 - DNA, 20 bp, synthetic construct
  source 1..20: mol_type = other DNA
tgccaggtcacaggctagac

SEQ ID NO: 285654 - DNA, 20 bp, synthetic construct
  source 1..20: mol_type = other DNA
ctgccaggtcacaggctaga

SEQ ID NO: 285655 - DNA, 20 bp, synthetic construct
  source 1..20: mol_type = other DNA
tctgccaggtcacaggctag

SEQ ID NO: 285656 - DNA, 20 bp, synthetic construct
  source 1..20: mol_type = other DNA
ctctgccaggtcacaggcta

SEQ ID NO: 285657 - DNA, 20 bp, synthetic construct
  source 1..20: mol_type = other DNA
tctctgccaggtcacaggct

SEQ ID NO: 285658 - DNA, 20 bp, synthetic construct
  source 1..20: mol_type = other DNA
ctctctgccaggtcacaggc

SEQ ID NO: 285659 - DNA, 20 bp, synthetic construct
  source 1..20: mol_type = other DNA
gctctctgccaggtcacagg

SEQ ID NO: 285660 - DNA, 20 bp, synthetic construct
  source 1..20: mol_type = other DNA
ggctctctgccaggtcacag

SEQ ID NO: 285661 - DNA, 20 bp, synthetic construct
  source 1..20: mol_type = other DNA
tggctctctgccaggtcaca

SEQ ID NO: 285662 - DNA, 20 bp, synthetic construct
  source 1..20: mol_type = other DNA
gtggctctctgccaggtcac

SEQ ID NO: 285663 - DNA, 20 bp, synthetic construct
  source 1..20: mol_type = other DNA
ggtggctctctgccaggtca

SEQ ID NO: 285664 - DNA, 20 bp, synthetic construct
  source 1..20: mol_type = other DNA
tggtggctctctgccaggtc

SEQ ID NO: 285665 - DNA, 20 bp, synthetic construct
  source 1..20: mol_type = other DNA
ctggtggctctctgccaggt

SEQ ID NO: 285666 - DNA, 20 bp, synthetic construct
  source 1..20: mol_type = other DNA
tctggtggctctctgccagg

SEQ ID NO: 285667 - DNA, 20 bp, synthetic construct
  source 1..20: mol_type = other DNA
atctggtggctctctgccag

SEQ ID NO: 285668 - DNA, 20 bp, synthetic construct
  source 1..20: mol_type = other DNA
catctggtggctctctgcca

SEQ ID NO: 285669 - DNA, 20 bp, synthetic construct
  source 1..20: mol_type = other DNA
acatctggtggctctctgcc

SEQ ID NO: 285670 - DNA, 20 bp, synthetic construct
  source 1..20: mol_type = other DNA
gacatctggtggctctctgc

SEQ ID NO: 285671 - DNA, 20 bp, synthetic construct
  source 1..20: mol_type = other DNA
ggacatctggtggctctctg

SEQ ID NO: 285672 - DNA, 20 bp, synthetic construct
  source 1..20: mol_type = other DNA
gggacatctggtggctctct

SEQ ID NO: 285673 - DNA, 20 bp, synthetic construct
  source 1..20: mol_type = other DNA
cgggacatctggtggctctc

SEQ ID NO: 285674 - DNA, 20 bp, synthetic construct
  source 1..20: mol_type = other DNA
ccgggacatctggtggctct

SEQ ID NO: 285675 - DNA, 20 bp, synthetic construct
  source 1..20: mol_type = other DNA
cccgggacatctggtggctc

SEQ ID NO: 285676 - DNA, 20 bp, synthetic construct
  source 1..20: mol_type = other DNA
gcccgggacatctggtggct

SEQ ID NO: 285677 - DNA, 20 bp, synthetic construct
  source 1..20: mol_type = other DNA
agcccgggacatctggtggc

SEQ ID NO: 285678 - DNA, 20 bp, synthetic construct
  source 1..20: mol_type = other DNA
cagcccgggacatctggtgg

SEQ ID NO: 285679 - DNA, 20 bp, synthetic construct
  source 1..20: mol_type = other DNA
tcagcccgggacatctggtg

SEQ ID NO: 285680 - DNA, 20 bp, synthetic construct
  source 1..20: mol_type = other DNA
ctcagcccgggacatctggt

SEQ ID NO: 285681 - DNA, 20 bp, synthetic construct
  source 1..20: mol_type = other DNA
gctcagcccgggacatctgg

SEQ ID NO: 285682 - DNA, 20 bp, synthetic construct
  source 1..20: mol_type = other DNA
tgctcagcccgggacatctg

SEQ ID NO: 285683 - DNA, 20 bp, synthetic construct
  source 1..20: mol_type = other DNA
gtgctcagcccgggacatct

SEQ ID NO: 285684 - DNA, 20 bp, synthetic construct
  source 1..20: mol_type = other DNA
agtgctcagcccgggacatc

SEQ ID NO: 285685 - DNA, 20 bp, synthetic construct
  source 1..20: mol_type = other DNA
cagtgctcagcccgggacat

SEQ ID NO: 285686 - DNA, 20 bp, synthetic construct
  source 1..20: mol_type = other DNA
gcagtgctcagcccgggaca

SEQ ID NO: 285687 - DNA, 20 bp, synthetic construct
  source 1..20: mol_type = other DNA
ggcagtgctcagcccgggac

SEQ ID NO: 285688 - DNA, 20 bp, synthetic construct
  source 1..20: mol_type = other DNA
gggcagtgctcagcccggga

SEQ ID NO: 285689 - DNA, 20 bp, synthetic construct
  source 1..20: mol_type = other DNA
agggcagtgctcagcccggg

SEQ ID NO: 285690 - DNA, 20 bp, synthetic construct
  source 1..20: mol_type = other DNA
gagggcagtgctcagcccgg

SEQ ID NO: 285691 - DNA, 20 bp, synthetic construct
  source 1..20: mol_type = other DNA
agagggcagtgctcagcccg

SEQ ID NO: 285692 - DNA, 20 bp, synthetic construct
  source 1..20: mol_type = other DNA
cagagggcagtgctcagccc

SEQ ID NO: 285693 - DNA, 20 bp, synthetic construct
  source 1..20: mol_type = other DNA
tcagagggcagtgctcagcc

SEQ ID NO: 285694 - DNA, 20 bp, synthetic construct
  source 1..20: mol_type = other DNA
ctcagagggcagtgctcagc

SEQ ID NO: 285695 - DNA, 20 bp, synthetic construct
  source 1..20: mol_type = other DNA
gctcagagggcagtgctcag

SEQ ID NO: 285696 - DNA, 20 bp, synthetic construct
  source 1..20: mol_type = other DNA
tgctcagagggcagtgctca

SEQ ID NO: 285697 - DNA, 20 bp, synthetic construct
  source 1..20: mol_type = other DNA
gtgctcagagggcagtgctc

SEQ ID NO: 285698 - DNA, 20 bp, synthetic construct
  source 1..20: mol_type = other DNA
ggtgctcagagggcagtgct

SEQ ID NO: 285699 - DNA, 20 bp, synthetic construct
  source 1..20: mol_type = other DNA
aggtgctcagagggcagtgc

SEQ ID NO: 285700 - DNA, 20 bp, synthetic construct
  source 1..20: mol_type = other DNA
aaggtgctcagagggcagtg

SEQ ID NO: 285701 - DNA, 20 bp, synthetic construct
  source 1..20: mol_type = other DNA
gaaggtgctcagagggcagt

SEQ ID NO: 285702 - DNA, 20 bp, synthetic construct
  source 1..20: mol_type = other DNA
tgaaggtgctcagagggcag

SEQ ID NO: 285703 - DNA, 20 bp, synthetic construct
  source 1..20: mol_type = other DNA
gtgaaggtgctcagagggca

SEQ ID NO: 285704 - DNA, 20 bp, synthetic construct
  source 1..20: mol_type = other DNA
tgtgaaggtgctcagagggc

SEQ ID NO: 285705 - DNA, 20 bp, synthetic construct
  source 1..20: mol_type = other DNA
ctgtgaaggtgctcagaggg

SEQ ID NO: 285706 - DNA, 20 bp, synthetic construct
  source 1..20: mol_type = other DNA
cctgtgaaggtgctcagagg

SEQ ID NO: 285707 - DNA, 20 bp, synthetic construct
  source 1..20: mol_type = other DNA
tcctgtgaaggtgctcagag

SEQ ID NO: 285708 - DNA, 20 bp, synthetic construct
  source 1..20: mol_type = other DNA
ttcctgtgaaggtgctcaga

SEQ ID NO: 285709 - DNA, 20 bp, synthetic construct
  source 1..20: mol_type = other DNA
cttcctgtgaaggtgctcag

SEQ ID NO: 285710 - DNA, 20 bp, synthetic construct
  source 1..20: mol_type = other DNA
gcttcctgtgaaggtgctca

SEQ ID NO: 285711 - DNA, 20 bp, synthetic construct
  source 1..20: mol_type = other DNA
ggcttcctgtgaaggtgctc

SEQ ID NO: 285712 - DNA, 20 bp, synthetic construct
  source 1..20: mol_type = other DNA
gggcttcctgtgaaggtgct

SEQ ID NO: 285713 - DNA, 20 bp, synthetic construct
  source 1..20: mol_type = other DNA
agggcttcctgtgaaggtgc

SEQ ID NO: 285714 - DNA, 20 bp, synthetic construct
  source 1..20: mol_type = other DNA
aagggcttcctgtgaaggtg

SEQ ID NO: 285715 - DNA, 20 bp, synthetic construct
  source 1..20: mol_type = other DNA
gaagggcttcctgtgaaggt

SEQ ID NO: 285716 - DNA, 20 bp, synthetic construct
  source 1..20: mol_type = other DNA
agaagggcttcctgtgaagg

SEQ ID NO: 285717 - DNA, 20 bp, synthetic construct
  source 1..20: mol_type = other DNA
gagaagggcttcctgtgaag

SEQ ID NO: 285718 - DNA, 20 bp, synthetic construct
  source 1..20: mol_type = other DNA
ggagaagggcttcctgtgaa

SEQ ID NO: 285719 - DNA, 20 bp, synthetic construct
  source 1..20: mol_type = other DNA
aggagaagggcttcctgtga

SEQ ID NO: 285720 - DNA, 20 bp, synthetic construct
  source 1..20: mol_type = other DNA
caggagaagggcttcctgtg

SEQ ID NO: 285721 - DNA, 20 bp, synthetic construct
  source 1..20: mol_type = other DNA
ccaggagaagggcttcctgt

SEQ ID NO: 285722 - DNA, 20 bp, synthetic construct
  source 1..20: mol_type = other DNA
accaggagaagggcttcctg

SEQ ID NO: 285723 - DNA, 20 bp, synthetic construct
  source 1..20: mol_type = other DNA
caccaggagaagggcttcct

SEQ ID NO: 285724 - DNA, 20 bp, synthetic construct
  source 1..20: mol_type = other DNA
tcaccaggagaagggcttcc

SEQ ID NO: 285725 - DNA, 20 bp, synthetic construct
  source 1..20: mol_type = other DNA
ctcaccaggagaagggcttc

SEQ ID NO: 285726 - DNA, 20 bp, synthetic construct
  source 1..20: mol_type = other DNA
tctcaccaggagaagggctt

SEQ ID NO: 285727 - DNA, 20 bp, synthetic construct
  source 1..20: mol_type = other DNA
ttctcaccaggagaagggct

SEQ ID NO: 285728 - DNA, 20 bp, synthetic construct
  source 1..20: mol_type = other DNA
cttctcaccaggagaagggc

SEQ ID NO: 285729 - DNA, 20 bp, synthetic construct
  source 1..20: mol_type = other DNA
tcttctcaccaggagaaggg

SEQ ID NO: 285730 - DNA, 20 bp, synthetic construct
  source 1..20: mol_type = other DNA
ctcttctcaccaggagaagg

SEQ ID NO: 285731 - DNA, 20 bp, synthetic construct
  source 1..20: mol_type = other DNA
tctcttctcaccaggagaag

SEQ ID NO: 285732 - DNA, 20 bp, synthetic construct
  source 1..20: mol_type = other DNA
atctcttctcaccaggagaa

SEQ ID NO: 285733 - DNA, 20 bp, synthetic construct
  source 1..20: mol_type = other DNA
catctcttctcaccaggaga

SEQ ID NO: 285734 - DNA, 20 bp, synthetic construct
  source 1..20: mol_type = other DNA
gcatctcttctcaccaggag

SEQ ID NO: 285735 - DNA, 20 bp, synthetic construct
  source 1..20: mol_type = other DNA
ggcatctcttctcaccagga

SEQ ID NO: 285736 - DNA, 20 bp, synthetic construct
  source 1..20: mol_type = other DNA
tggcatctcttctcaccagg

SEQ ID NO: 285737 - DNA, 20 bp, synthetic construct
  source 1..20: mol_type = other DNA
ctggcatctcttctcaccag

SEQ ID NO: 285738 - DNA, 20 bp, synthetic construct
  source 1..20: mol_type = other DNA
gctggcatctcttctcacca

SEQ ID NO: 285739 - DNA, 20 bp, synthetic construct
  source 1..20: mol_type = other DNA
ggctggcatctcttctcacc

SEQ ID NO: 285740 - DNA, 20 bp, synthetic construct
  source 1..20: mol_type = other DNA
gggctggcatctcttctcac

SEQ ID NO: 285741 - DNA, 20 bp, synthetic construct
  source 1..20: mol_type = other DNA
ggggctggcatctcttctca

SEQ ID NO: 285742 - DNA, 20 bp, synthetic construct
  source 1..20: mol_type = other DNA
aggggctggcatctcttctc

SEQ ID NO: 285743 - DNA, 20 bp, synthetic construct
  source 1..20: mol_type = other DNA
caggggctggcatctcttct

SEQ ID NO: 285744 - DNA, 20 bp, synthetic construct
  source 1..20: mol_type = other DNA
ccaggggctggcatctcttc

SEQ ID NO: 285745 - DNA, 20 bp, synthetic construct
  source 1..20: mol_type = other DNA
gccaggggctggcatctctt

SEQ ID NO: 285746 - DNA, 20 bp, synthetic construct
  source 1..20: mol_type = other DNA
tgccaggggctggcatctct

SEQ ID NO: 285747 - DNA, 20 bp, synthetic construct
  source 1..20: mol_type = other DNA
atgccaggggctggcatctc

SEQ ID NO: 285748 - DNA, 20 bp, synthetic construct
  source 1..20: mol_type = other DNA
gatgccaggggctggcatct

SEQ ID NO: 285749 - DNA, 20 bp, synthetic construct
  source 1..20: mol_type = other DNA
agatgccaggggctggcatc

SEQ ID NO: 285750 - DNA, 20 bp, synthetic construct
  source 1..20: mol_type = other DNA
cagatgccaggggctggcat

SEQ ID NO: 285751 - DNA, 20 bp, synthetic construct
  source 1..20: mol_type = other DNA
ccagatgccaggggctggca

SEQ ID NO: 285752 - DNA, 20 bp, synthetic construct
  source 1..20: mol_type = other DNA
cccagatgccaggggctggc

SEQ ID NO: 285753 - DNA, 20 bp, synthetic construct
  source 1..20: mol_type = other DNA
ccccagatgccaggggctgg

SEQ ID NO: 285754 - DNA, 20 bp, synthetic construct
  source 1..20: mol_type = other DNA
cccccagatgccaggggctg

SEQ ID NO: 285755 - DNA, 20 bp, synthetic construct
  source 1..20: mol_type = other DNA
gcccccagatgccaggggct

SEQ ID NO: 285756 - DNA, 20 bp, synthetic construct
  source 1..20: mol_type = other DNA
tgcccccagatgccaggggc

SEQ ID NO: 285757 - DNA, 20 bp, synthetic construct
  source 1..20: mol_type = other DNA
gtgcccccagatgccagggg

SEQ ID NO: 285758 - DNA, 20 bp, synthetic construct
  source 1..20: mol_type = other DNA
agtgcccccagatgccaggg

SEQ ID NO: 285759 - DNA, 20 bp, synthetic construct
  source 1..20: mol_type = other DNA
cagtgcccccagatgccagg

SEQ ID NO: 285760 - DNA, 20 bp, synthetic construct
  source 1..20: mol_type = other DNA
ccagtgcccccagatgccag

SEQ ID NO: 285761 - DNA, 20 bp, synthetic construct
  source 1..20: mol_type = other DNA
tccagtgcccccagatgcca

SEQ ID NO: 285762 - DNA, 20 bp, synthetic construct
  source 1..20: mol_type = other DNA
atccagtgcccccagatgcc

SEQ ID NO: 285763 - DNA, 20 bp, synthetic construct
  source 1..20: mol_type = other DNA
gatccagtgcccccagatgc

SEQ ID NO: 285764 - DNA, 20 bp, synthetic construct
  source 1..20: mol_type = other DNA
ggatccagtgcccccagatg

SEQ ID NO: 285765 - DNA, 20 bp, synthetic construct
  source 1..20: mol_type = other DNA
gggatccagtgcccccagat

SEQ ID NO: 285766 - DNA, 20 bp, synthetic construct
  source 1..20: mol_type = other DNA
agggatccagtgcccccaga

SEQ ID NO: 285767 - DNA, 20 bp, synthetic construct
  source 1..20: mol_type = other DNA
cagggatccagtgcccccag

SEQ ID NO: 285768 - DNA, 20 bp, synthetic construct
  source 1..20: mol_type = other DNA
ccagggatccagtgccccca

SEQ ID NO: 285769 - DNA, 20 bp, synthetic construct
  source 1..20: mol_type = other DNA
gccagggatccagtgccccc

SEQ ID NO: 285770 - DNA, 20 bp, synthetic construct
  source 1..20: mol_type = other DNA
ggccagggatccagtgcccc

SEQ ID NO: 285771 - DNA, 20 bp, synthetic construct
  source 1..20: mol_type = other DNA
aggccagggatccagtgccc

SEQ ID NO: 285772 - DNA, 20 bp, synthetic construct
  source 1..20: mol_type = other DNA
caggccagggatccagtgcc

SEQ ID NO: 285773 - DNA, 20 bp, synthetic construct
  source 1..20: mol_type = other DNA
tcaggccagggatccagtgc

SEQ ID NO: 285774 - DNA, 20 bp, synthetic construct
  source 1..20: mol_type = other DNA
ctcaggccagggatccagtg

SEQ ID NO: 285775 - DNA, 20 bp, synthetic construct
  source 1..20: mol_type = other DNA
gctcaggccagggatccagt

SEQ ID NO: 285776 - DNA, 20 bp, synthetic construct
  source 1..20: mol_type = other DNA
ggctcaggccagggatccag

SEQ ID NO: 285777 - DNA, 20 bp, synthetic construct
  source 1..20: mol_type = other DNA
gggctcaggccagggatcca

SEQ ID NO: 285778 - DNA, 20 bp, synthetic construct
  source 1..20: mol_type = other DNA
agggctcaggccagggatcc

SEQ ID NO: 285779 - DNA, 20 bp, synthetic construct
  source 1..20: mol_type = other DNA
tagggctcaggccagggatc

SEQ ID NO: 285780 - DNA, 20 bp, synthetic construct
  source 1..20: mol_type = other DNA
ctagggctcaggccagggat

SEQ ID NO: 285781 - DNA, 20 bp, synthetic construct
  source 1..20: mol_type = other DNA
gctagggctcaggccaggga

SEQ ID NO: 285782 - DNA, 20 bp, synthetic construct
  source 1..20: mol_type = other DNA
ggctagggctcaggccaggg

SEQ ID NO: 285783 - DNA, 20 bp, synthetic construct
  source 1..20: mol_type = other DNA
aggctagggctcaggccagg

SEQ ID NO: 285784 - DNA, 20 bp, synthetic construct
  source 1..20: mol_type = other DNA
gaggctagggctcaggccag

SEQ ID NO: 285785 - DNA, 20 bp, synthetic construct
  source 1..20: mol_type = other DNA
agaggctagggctcaggcca

SEQ ID NO: 285786 - DNA, 20 bp, synthetic construct
  source 1..20: mol_type = other DNA
gagaggctagggctcaggcc

SEQ ID NO: 285787 - DNA, 20 bp, synthetic construct
  source 1..20: mol_type = other DNA
ggagaggctagggctcaggc

SEQ ID NO: 285788 - DNA, 20 bp, synthetic construct
  source 1..20: mol_type = other DNA
gggagaggctagggctcagg

SEQ ID NO: 285789 - DNA, 20 bp, synthetic construct
  source 1..20: mol_type = other DNA
ggggagaggctagggctcag

SEQ ID NO: 285790 - DNA, 20 bp, synthetic construct
  source 1..20: mol_type = other DNA
tggggagaggctagggctca

SEQ ID NO: 285791 - DNA, 20 bp, synthetic construct
  source 1..20: mol_type = other DNA
ctggggagaggctagggctc

SEQ ID NO: 285792 - DNA, 20 bp, synthetic construct
  source 1..20: mol_type = other DNA
gctggggagaggctagggct

SEQ ID NO: 285793 - DNA, 20 bp, synthetic construct
  source 1..20: mol_type = other DNA
ggctggggagaggctagggc

SEQ ID NO: 285794 - DNA, 20 bp, synthetic construct
  source 1..20: mol_type = other DNA
aggctggggagaggctaggg

SEQ ID NO: 285795 - DNA, 20 bp, synthetic construct
  source 1..20: mol_type = other DNA
caggctggggagaggctagg

SEQ ID NO: 285796 - DNA, 20 bp, synthetic construct
  source 1..20: mol_type = other DNA
ccaggctggggagaggctag

SEQ ID NO: 285797 - DNA, 20 bp, synthetic construct
  source 1..20: mol_type = other DNA
cccaggctggggagaggcta

SEQ ID NO: 285798 - DNA, 20 bp, synthetic construct
  source 1..20: mol_type = other DNA
ccccaggctggggagaggct

SEQ ID NO: 285799 - DNA, 20 bp, synthetic construct
  source 1..20: mol_type = other DNA
cccccaggctggggagaggc

SEQ ID NO: 285800 - DNA, 20 bp, synthetic construct
  source 1..20: mol_type = other DNA
gcccccaggctggggagagg

SEQ ID NO: 285801 - DNA, 20 bp, synthetic construct
  source 1..20: mol_type = other DNA
ggcccccaggctggggagag

SEQ ID NO: 285802 - DNA, 20 bp, synthetic construct
  source 1..20: mol_type = other DNA
gggcccccaggctggggaga

SEQ ID NO: 285803 - DNA, 20 bp, synthetic construct
  source 1..20: mol_type = other DNA
ggggcccccaggctggggag

SEQ ID NO: 285804 - DNA, 20 bp, synthetic construct
  source 1..20: mol_type = other DNA
aggggcccccaggctgggga

SEQ ID NO: 285805 - DNA, 20 bp, synthetic construct
  source 1..20: mol_type = other DNA
aaggggcccccaggctgggg

SEQ ID NO: 285806 - DNA, 20 bp, synthetic construct
  source 1..20: mol_type = other DNA
gaaggggcccccaggctggg

SEQ ID NO: 285807 - DNA, 20 bp, synthetic construct
  source 1..20: mol_type = other DNA
ggaaggggcccccaggctgg

SEQ ID NO: 285808 - DNA, 20 bp, synthetic construct
  source 1..20: mol_type = other DNA
gggaaggggcccccaggctg

SEQ ID NO: 285809 - DNA, 20 bp, synthetic construct
  source 1..20: mol_type = other DNA
tgggaaggggcccccaggct

SEQ ID NO: 285810 - DNA, 20 bp, synthetic construct
  source 1..20: mol_type = other DNA
ctgggaaggggcccccaggc

SEQ ID NO: 285811 - DNA, 20 bp, synthetic construct
  source 1..20: mol_type = other DNA
gctgggaaggggcccccagg

SEQ ID NO: 285812 - DNA, 20 bp, synthetic construct
  source 1..20: mol_type = other DNA
tgctgggaaggggcccccag

SEQ ID NO: 285813 - DNA, 20 bp, synthetic construct
  source 1..20: mol_type = other DNA
ctgctgggaaggggccccca

SEQ ID NO: 285814 - DNA, 20 bp, synthetic construct
  source 1..20: mol_type = other DNA
cctgctgggaaggggccccc

SEQ ID NO: 285815 - DNA, 20 bp, synthetic construct
  source 1..20: mol_type = other DNA
gcctgctgggaaggggcccc

SEQ ID NO: 285816 - DNA, 20 bp, synthetic construct
  source 1..20: mol_type = other DNA
agcctgctgggaaggggccc

SEQ ID NO: 285817 - DNA, 20 bp, synthetic construct
  source 1..20: mol_type = other DNA
cagcctgctgggaaggggcc

SEQ ID NO: 285818 - DNA, 20 bp, synthetic construct
  source 1..20: mol_type = other DNA
ccagcctgctgggaaggggc

SEQ ID NO: 285819 - DNA, 20 bp, synthetic construct
  source 1..20: mol_type = other DNA
gccagcctgctgggaagggg

SEQ ID NO: 285820 - DNA, 20 bp, synthetic construct
  source 1..20: mol_type = other DNA
ggccagcctgctgggaaggg

SEQ ID NO: 285821 - DNA, 20 bp, synthetic construct
  source 1..20: mol_type = other DNA
gggccagcctgctgggaagg

SEQ ID NO: 285822 - DNA, 20 bp, synthetic construct
  source 1..20: mol_type = other DNA
agggccagcctgctgggaag

SEQ ID NO: 285823 - DNA, 20 bp, synthetic construct
  source 1..20: mol_type = other DNA
cagggccagcctgctgggaa

SEQ ID NO: 285824 - DNA, 20 bp, synthetic construct
  source 1..20: mol_type = other DNA
gcagggccagcctgctggga

SEQ ID NO: 285825 - DNA, 20 bp, synthetic construct
  source 1..20: mol_type = other DNA
agcagggccagcctgctggg

SEQ ID NO: 285826 - DNA, 20 bp, synthetic construct
  source 1..20: mol_type = other DNA
gagcagggccagcctgctgg

SEQ ID NO: 285827 - DNA, 20 bp, synthetic construct
  source 1..20: mol_type = other DNA
ggagcagggccagcctgctg

SEQ ID NO: 285828 - DNA, 20 bp, synthetic construct
  source 1..20: mol_type = other DNA
aggagcagggccagcctgct

SEQ ID NO: 285829 - DNA, 20 bp, synthetic construct
  source 1..20: mol_type = other DNA
aaggagcagggccagcctgc

SEQ ID NO: 285830 - DNA, 20 bp, synthetic construct
  source 1..20: mol_type = other DNA
gaaggagcagggccagcctg

SEQ ID NO: 285831 - DNA, 20 bp, synthetic construct
  source 1..20: mol_type = other DNA
agaaggagcagggccagcct

SEQ ID NO: 285832 - DNA, 20 bp, synthetic construct
  source 1..20: mol_type = other DNA
gagaaggagcagggccagcc

SEQ ID NO: 285833 - DNA, 20 bp, synthetic construct
  source 1..20: mol_type = other DNA
agagaaggagcagggccagc

SEQ ID NO: 285834 - DNA, 20 bp, synthetic construct
  source 1..20: mol_type = other DNA
tagagaaggagcagggccag

SEQ ID NO: 285835 - DNA, 20 bp, synthetic construct
  source 1..20: mol_type = other DNA
gtagagaaggagcagggcca

SEQ ID NO: 285836 - DNA, 20 bp, synthetic construct
  source 1..20: mol_type = other DNA
ggtagagaaggagcagggcc

SEQ ID NO: 285837 - DNA, 20 bp, synthetic construct
  source 1..20: mol_type = other DNA
aggtagagaaggagcagggc

SEQ ID NO: 285838 - DNA, 20 bp, synthetic construct
  source 1..20: mol_type = other DNA
caggtagagaaggagcaggg

SEQ ID NO: 285839 - DNA, 20 bp, synthetic construct
  source 1..20: mol_type = other DNA
ccaggtagagaaggagcagg

SEQ ID NO: 285840 - DNA, 20 bp, synthetic construct
  source 1..20: mol_type = other DNA
cccaggtagagaaggagcag

SEQ ID NO: 285841 - DNA, 20 bp, synthetic construct
  source 1..20: mol_type = other DNA
tcccaggtagagaaggagca

SEQ ID NO: 285842 - DNA, 20 bp, synthetic construct
  source 1..20: mol_type = other DNA
gtcccaggtagagaaggagc

SEQ ID NO: 285843 - DNA, 20 bp, synthetic construct
  source 1..20: mol_type = other DNA
ggtcccaggtagagaaggag

SEQ ID NO: 285844 - DNA, 20 bp, synthetic construct
  source 1..20: mol_type = other DNA
gggtcccaggtagagaagga

SEQ ID NO: 285845 - DNA, 20 bp, synthetic construct
  source 1..20: mol_type = other DNA
agggtcccaggtagagaagg

SEQ ID NO: 285846 - DNA, 20 bp, synthetic construct
  source 1..20: mol_type = other DNA
aagggtcccaggtagagaag

SEQ ID NO: 285847 - DNA, 20 bp, synthetic construct
  source 1..20: mol_type = other DNA
gaagggtcccaggtagagaa

SEQ ID NO: 285848 - DNA, 20 bp, synthetic construct
  source 1..20: mol_type = other DNA
agaagggtcccaggtagaga

SEQ ID NO: 285849 - DNA, 20 bp, synthetic construct
  source 1..20: mol_type = other DNA
cagaagggtcccaggtagag

SEQ ID NO: 285850 - DNA, 20 bp, synthetic construct
  source 1..20: mol_type = other DNA
gcagaagggtcccaggtaga

SEQ ID NO: 285851 - DNA, 20 bp, synthetic construct
  source 1..20: mol_type = other DNA
ggcagaagggtcccaggtag

SEQ ID NO: 285852 - DNA, 20 bp, synthetic construct
  source 1..20: mol_type = other DNA
aggcagaagggtcccaggta

SEQ ID NO: 285853 - DNA, 20 bp, synthetic construct
  source 1..20: mol_type = other DNA
gaggcagaagggtcccaggt

SEQ ID NO: 285854 - DNA, 20 bp, synthetic construct
  source 1..20: mol_type = other DNA
ggaggcagaagggtcccagg

SEQ ID NO: 285855 - DNA, 20 bp, synthetic construct
  source 1..20: mol_type = other DNA
aggaggcagaagggtcccag

SEQ ID NO: 285856 - DNA, 20 bp, synthetic construct
  source 1..20: mol_type = other DNA
caggaggcagaagggtccca

SEQ ID NO: 285857 - DNA, 20 bp, synthetic construct
  source 1..20: mol_type = other DNA
ccaggaggcagaagggtccc

SEQ ID NO: 285858 - DNA, 20 bp, synthetic construct
  source 1..20: mol_type = other DNA
gccaggaggcagaagggtcc

SEQ ID NO: 285859 - DNA, 20 bp, synthetic construct
  source 1..20: mol_type = other DNA
agccaggaggcagaagggtc

SEQ ID NO: 285860 - DNA, 20 bp, synthetic construct
  source 1..20: mol_type = other DNA
cagccaggaggcagaagggt

SEQ ID NO: 285861 - DNA, 20 bp, synthetic construct
  source 1..20: mol_type = other DNA
ccagccaggaggcagaaggg

SEQ ID NO: 285862 - DNA, 20 bp, synthetic construct
  source 1..20: mol_type = other DNA
tccagccaggaggcagaagg

SEQ ID NO: 285863 - DNA, 20 bp, synthetic construct
  source 1..20: mol_type = other DNA
gtccagccaggaggcagaag

SEQ ID NO: 285864 - DNA, 20 bp, synthetic construct
  source 1..20: mol_type = other DNA
ggtccagccaggaggcagaa

SEQ ID NO: 285865 - DNA, 20 bp, synthetic construct
  source 1..20: mol_type = other DNA
gggtccagccaggaggcaga

SEQ ID NO: 285866 - DNA, 20 bp, synthetic construct
  source 1..20: mol_type = other DNA
agggtccagccaggaggcag

SEQ ID NO: 285867 - DNA, 20 bp, synthetic construct
  source 1..20: mol_type = other DNA
cagggtccagccaggaggca

SEQ ID NO: 285868 - DNA, 20 bp, synthetic construct
  source 1..20: mol_type = other DNA
ccagggtccagccaggaggc

SEQ ID NO: 285869 - DNA, 20 bp, synthetic construct
  source 1..20: mol_type = other DNA
tccagggtccagccaggagg

SEQ ID NO: 285870 - DNA, 20 bp, synthetic construct
  source 1..20: mol_type = other DNA
ttccagggtccagccaggag

SEQ ID NO: 285871 - DNA, 20 bp, synthetic construct
  source 1..20: mol_type = other DNA
cttccagggtccagccagga

SEQ ID NO: 285872 - DNA, 20 bp, synthetic construct
  source 1..20: mol_type = other DNA
gcttccagggtccagccagg

SEQ ID NO: 285873 - DNA, 20 bp, synthetic construct
  source 1..20: mol_type = other DNA
agcttccagggtccagccag

SEQ ID NO: 285874 - DNA, 20 bp, synthetic construct
  source 1..20: mol_type = other DNA
gagcttccagggtccagcca

SEQ ID NO: 285875 - DNA, 20 bp, synthetic construct
  source 1..20: mol_type = other DNA
agagcttccagggtccagcc

SEQ ID NO: 285876 - DNA, 20 bp, synthetic construct
  source 1..20: mol_type = other DNA
cagagcttccagggtccagc

SEQ ID NO: 285877 - DNA, 20 bp, synthetic construct
  source 1..20: mol_type = other DNA
gcagagcttccagggtccag

SEQ ID NO: 285878 - DNA, 20 bp, synthetic construct
  source 1..20: mol_type = other DNA
tgcagagcttccagggtcca

SEQ ID NO: 285879 - DNA, 20 bp, synthetic construct
  source 1..20: mol_type = other DNA
ctgcagagcttccagggtcc

SEQ ID NO: 285880 - DNA, 20 bp, synthetic construct
  source 1..20: mol_type = other DNA
cctgcagagcttccagggtc

SEQ ID NO: 285881 - DNA, 20 bp, synthetic construct
  source 1..20: mol_type = other DNA
ccctgcagagcttccagggt

SEQ ID NO: 285882 - DNA, 20 bp, synthetic construct
  source 1..20: mol_type = other DNA
gccctgcagagcttccaggg

SEQ ID NO: 285883 - DNA, 20 bp, synthetic construct
  source 1..20: mol_type = other DNA
ggccctgcagagcttccagg

SEQ ID NO: 285884 - DNA, 20 bp, synthetic construct
  source 1..20: mol_type = other DNA
aggccctgcagagcttccag

SEQ ID NO: 285885 - DNA, 20 bp, synthetic construct
  source 1..20: mol_type = other DNA
caggccctgcagagcttcca

SEQ ID NO: 285886 - DNA, 20 bp, synthetic construct
  source 1..20: mol_type = other DNA
gcaggccctgcagagcttcc

SEQ ID NO: 285887 - DNA, 20 bp, synthetic construct
  source 1..20: mol_type = other DNA
agcaggccctgcagagcttc

SEQ ID NO: 285888 - DNA, 20 bp, synthetic construct
  source 1..20: mol_type = other DNA
cagcaggccctgcagagctt

SEQ ID NO: 285889 - DNA, 20 bp, synthetic construct
  source 1..20: mol_type = other DNA
acagcaggccctgcagagct

SEQ ID NO: 285890 - DNA, 20 bp, synthetic construct
  source 1..20: mol_type = other DNA
gacagcaggccctgcagagc

SEQ ID NO: 285891 - DNA, 20 bp, synthetic construct
  source 1..20: mol_type = other DNA
ggacagcaggccctgcagag

SEQ ID NO: 285892 - DNA, 20 bp, synthetic construct
  source 1..20: mol_type = other DNA
gggacagcaggccctgcaga

SEQ ID NO: 285893 - DNA, 20 bp, synthetic construct
  source 1..20: mol_type = other DNA
ggggacagcaggccctgcag

SEQ ID NO: 285894 - DNA, 20 bp, synthetic construct
  source 1..20: mol_type = other DNA
gggggacagcaggccctgca

SEQ ID NO: 285895 - DNA, 20 bp, synthetic construct
  source 1..20: mol_type = other DNA
agggggacagcaggccctgc

SEQ ID NO: 285896 - DNA, 20 bp, synthetic construct
  source 1..20: mol_type = other DNA
gagggggacagcaggccctg

SEQ ID NO: 285897 - DNA, 20 bp, synthetic construct
  source 1..20: mol_type = other DNA
ggagggggacagcaggccct

SEQ ID NO: 285898 - DNA, 20 bp, synthetic construct
  source 1..20: mol_type = other DNA
gggagggggacagcaggccc

SEQ ID NO: 285899 - DNA, 20 bp, synthetic construct
  source 1..20: mol_type = other DNA
agggagggggacagcaggcc

SEQ ID NO: 285900 - DNA, 20 bp, synthetic construct
  source 1..20: mol_type = other DNA
cagggagggggacagcaggc

SEQ ID NO: 285901 - DNA, 20 bp, synthetic construct
  source 1..20: mol_type = other DNA
gcagggagggggacagcagg

SEQ ID NO: 285902 - DNA, 20 bp, synthetic construct
  source 1..20: mol_type = other DNA
ggcagggagggggacagcag

SEQ ID NO: 285903 - DNA, 20 bp, synthetic construct
  source 1..20: mol_type = other DNA
gggcagggagggggacagca

SEQ ID NO: 285904 - DNA, 20 bp, synthetic construct
  source 1..20: mol_type = other DNA
agggcagggagggggacagc

SEQ ID NO: 285905 - DNA, 20 bp, synthetic construct
  source 1..20: mol_type = other DNA
gagggcagggagggggacag

SEQ ID NO: 285906 - DNA, 20 bp, synthetic construct
  source 1..20: mol_type = other DNA
ggagggcagggagggggaca

SEQ ID NO: 285907 - DNA, 20 bp, synthetic construct
  source 1..20: mol_type = other DNA
tggagggcagggagggggac

SEQ ID NO: 285908 - DNA, 20 bp, synthetic construct
  source 1..20: mol_type = other DNA
ctggagggcagggaggggga

SEQ ID NO: 285909 - DNA, 20 bp, synthetic construct
  source 1..20: mol_type = other DNA
cctggagggcagggaggggg

SEQ ID NO: 285910 - DNA, 20 bp, synthetic construct
  source 1..20: mol_type = other DNA
acctggagggcagggagggg

SEQ ID NO: 285911 - DNA, 20 bp, synthetic construct
  source 1..20: mol_type = other DNA
tacctggagggcagggaggg

SEQ ID NO: 285912 - DNA, 20 bp, synthetic construct
  source 1..20: mol_type = other DNA
atacctggagggcagggagg

SEQ ID NO: 285913 - DNA, 20 bp, synthetic construct
  source 1..20: mol_type = other DNA
gatacctggagggcagggag

SEQ ID NO: 285914 - DNA, 20 bp, synthetic construct
  source 1..20: mol_type = other DNA
ggatacctggagggcaggga

SEQ ID NO: 285915 - DNA, 20 bp, synthetic construct
  source 1..20: mol_type = other DNA
aggatacctggagggcaggg

SEQ ID NO: 285916 - DNA, 20 bp, synthetic construct
  source 1..20: mol_type = other DNA
caggatacctggagggcagg

SEQ ID NO: 285917 - DNA, 20 bp, synthetic construct
  source 1..20: mol_type = other DNA
tcaggatacctggagggcag

SEQ ID NO: 285918 - DNA, 20 bp, synthetic construct
  source 1..20: mol_type = other DNA
gtcaggatacctggagggca

SEQ ID NO: 285919 - DNA, 20 bp, synthetic construct
  source 1..20: mol_type = other DNA
ggtcaggatacctggagggc

SEQ ID NO: 285920 - DNA, 20 bp, synthetic construct
  source 1..20: mol_type = other DNA
tggtcaggatacctggaggg

SEQ ID NO: 285921 - DNA, 20 bp, synthetic construct
  source 1..20: mol_type = other DNA
gtggtcaggatacctggagg

SEQ ID NO: 285922 - DNA, 20 bp, synthetic construct
  source 1..20: mol_type = other DNA
ggtggtcaggatacctggag

SEQ ID NO: 285923 - DNA, 20 bp, synthetic construct
  source 1..20: mol_type = other DNA
cggtggtcaggatacctgga

SEQ ID NO: 285924 - DNA, 20 bp, synthetic construct
  source 1..20: mol_type = other DNA
ccggtggtcaggatacctgg

SEQ ID NO: 285925 - DNA, 20 bp, synthetic construct
  source 1..20: mol_type = other DNA
gccggtggtcaggatacctg

SEQ ID NO: 285926 - DNA, 20 bp, synthetic construct
  source 1..20: mol_type = other DNA
ggccggtggtcaggatacct

SEQ ID NO: 285927 - DNA, 20 bp, synthetic construct
  source 1..20: mol_type = other DNA
gggccggtggtcaggatacc

SEQ ID NO: 285928 - DNA, 20 bp, synthetic construct
  source 1..20: mol_type = other DNA
agggccggtggtcaggatac

SEQ ID NO: 285929 - DNA, 20 bp, synthetic construct
  source 1..20: mol_type = other DNA
cagggccggtggtcaggata

SEQ ID NO: 285930 - DNA, 20 bp, synthetic construct
  source 1..20: mol_type = other DNA
ccagggccggtggtcaggat

SEQ ID NO: 285931 - DNA, 20 bp, synthetic construct
  source 1..20: mol_type = other DNA
gccagggccggtggtcagga

SEQ ID NO: 285932 - DNA, 20 bp, synthetic construct
  source 1..20: mol_type = other DNA
agccagggccggtggtcagg

SEQ ID NO: 285933 - DNA, 20 bp, synthetic construct
  source 1..20: mol_type = other DNA
gagccagggccggtggtcag

SEQ ID NO: 285934 - DNA, 20 bp, synthetic construct
  source 1..20: mol_type = other DNA
ggagccagggccggtggtca

SEQ ID NO: 285935 - DNA, 20 bp, synthetic construct
  source 1..20: mol_type = other DNA
gggagccagggccggtggtc

SEQ ID NO: 285936 - DNA, 20 bp, synthetic construct
  source 1..20: mol_type = other DNA
tgggagccagggccggtggt

SEQ ID NO: 285937 - DNA, 20 bp, synthetic construct
  source 1..20: mol_type = other DNA
gtgggagccagggccggtgg

SEQ ID NO: 285938 - DNA, 20 bp, synthetic construct
  source 1..20: mol_type = other DNA
agtgggagccagggccggtg

SEQ ID NO: 285939 - DNA, 20 bp, synthetic construct
  source 1..20: mol_type = other DNA
cagtgggagccagggccggt

SEQ ID NO: 285940 - DNA, 20 bp, synthetic construct
  source 1..20: mol_type = other DNA
gcagtgggagccagggccgg

SEQ ID NO: 285941 - DNA, 20 bp, synthetic construct
  source 1..20: mol_type = other DNA
ggcagtgggagccagggccg

SEQ ID NO: 285942 - DNA, 20 bp, synthetic construct
  source 1..20: mol_type = other DNA
tggcagtgggagccagggcc

SEQ ID NO: 285943 - DNA, 20 bp, synthetic construct
  source 1..20: mol_type = other DNA
atggcagtgggagccagggc

SEQ ID NO: 285944 - DNA, 20 bp, synthetic construct
  source 1..20: mol_type = other DNA
gatggcagtgggagccaggg

SEQ ID NO: 285945 - DNA, 20 bp, synthetic construct
  source 1..20: mol_type = other DNA
ggatggcagtgggagccagg

SEQ ID NO: 285946 - DNA, 20 bp, synthetic construct
  source 1..20: mol_type = other DNA
tggatggcagtgggagccag

SEQ ID NO: 285947 - DNA, 20 bp, synthetic construct
  source 1..20: mol_type = other DNA
gtggatggcagtgggagcca

SEQ ID NO: 285948 - DNA, 20 bp, synthetic construct
  source 1..20: mol_type = other DNA
agtggatggcagtgggagcc

SEQ ID NO: 285949 - DNA, 20 bp, synthetic construct
  source 1..20: mol_type = other DNA
gagtggatggcagtgggagc

SEQ ID NO: 285950 - DNA, 20 bp, synthetic construct
  source 1..20: mol_type = other DNA
ggagtggatggcagtgggag

SEQ ID NO: 285951 - DNA, 20 bp, synthetic construct
  source 1..20: mol_type = other DNA
aggagtggatggcagtggga

SEQ ID NO: 285952 - DNA, 20 bp, synthetic construct
  source 1..20: mol_type = other DNA
gaggagtggatggcagtggg

SEQ ID NO: 285953 - DNA, 20 bp, synthetic construct
  source 1..20: mol_type = other DNA
agaggagtggatggcagtgg

SEQ ID NO: 285954 - DNA, 20 bp, synthetic construct
  source 1..20: mol_type = other DNA
gagaggagtggatggcagtg

SEQ ID NO: 285955 - DNA, 20 bp, synthetic construct
  source 1..20: mol_type = other DNA
ggagaggagtggatggcagt

SEQ ID NO: 285956 - DNA, 20 bp, synthetic construct
  source 1..20: mol_type = other DNA
aggagaggagtggatggcag

SEQ ID NO: 285957 - DNA, 20 bp, synthetic construct
  source 1..20: mol_type = other DNA
aaggagaggagtggatggca

SEQ ID NO: 285958 - DNA, 20 bp, synthetic construct
  source 1..20: mol_type = other DNA
aaaggagaggagtggatggc

SEQ ID NO: 285959 - DNA, 20 bp, synthetic construct
  source 1..20: mol_type = other DNA
gaaaggagaggagtggatgg

SEQ ID NO: 285960 - DNA, 20 bp, synthetic construct
  source 1..20: mol_type = other DNA
agaaaggagaggagtggatg

SEQ ID NO: 285961 - DNA, 20 bp, synthetic construct
  source 1..20: mol_type = other DNA
cagaaaggagaggagtggat

SEQ ID NO: 285962 - DNA, 20 bp, synthetic construct
  source 1..20: mol_type = other DNA
ccagaaaggagaggagtgga

SEQ ID NO: 285963 - DNA, 20 bp, synthetic construct
  source 1..20: mol_type = other DNA
gccagaaaggagaggagtgg

SEQ ID NO: 285964 - DNA, 20 bp, synthetic construct
  source 1..20: mol_type = other DNA
ggccagaaaggagaggagtg

SEQ ID NO: 285965 - DNA, 20 bp, synthetic construct
  source 1..20: mol_type = other DNA
cggccagaaaggagaggagt

SEQ ID NO: 285966 - DNA, 20 bp, synthetic construct
  source 1..20: mol_type = other DNA
acggccagaaaggagaggag

SEQ ID NO: 285967 - DNA, 20 bp, synthetic construct
  source 1..20: mol_type = other DNA
aacggccagaaaggagagga

SEQ ID NO: 285968 - DNA, 20 bp, synthetic construct
  source 1..20: mol_type = other DNA
gaacggccagaaaggagagg

SEQ ID NO: 285969 - DNA, 20 bp, synthetic construct
  source 1..20: mol_type = other DNA
ggaacggccagaaaggagag

SEQ ID NO: 285970 - DNA, 20 bp, synthetic construct
  source 1..20: mol_type = other DNA
gggaacggccagaaaggaga

SEQ ID NO: 285971 - DNA, 20 bp, synthetic construct
  source 1..20: mol_type = other DNA
agggaacggccagaaaggag

SEQ ID NO: 285972 - DNA, 20 bp, synthetic construct
  source 1..20: mol_type = other DNA
cagggaacggccagaaagga

SEQ ID NO: 285973 - DNA, 20 bp, synthetic construct
  source 1..20: mol_type = other DNA
ccagggaacggccagaaagg

SEQ ID NO: 285974 - DNA, 20 bp, synthetic construct
  source 1..20: mol_type = other DNA
accagggaacggccagaaag

SEQ ID NO: 285975 - DNA, 20 bp, synthetic construct
  source 1..20: mol_type = other DNA
gaccagggaacggccagaaa

SEQ ID NO: 285976 - DNA, 20 bp, synthetic construct
  source 1..20: mol_type = other DNA
ggaccagggaacggccagaa

SEQ ID NO: 285977 - DNA, 20 bp, synthetic construct
  source 1..20: mol_type = other DNA
gggaccagggaacggccaga

SEQ ID NO: 285978 - DNA, 20 bp, synthetic construct
  source 1..20: mol_type = other DNA
agggaccagggaacggccag

SEQ ID NO: 285979 - DNA, 20 bp, synthetic construct
  source 1..20: mol_type = other DNA
cagggaccagggaacggcca

SEQ ID NO: 285980 - DNA, 20 bp, synthetic construct
  source 1..20: mol_type = other DNA
acagggaccagggaacggcc

SEQ ID NO: 285981 - DNA, 20 bp, synthetic construct
  source 1..20: mol_type = other DNA
gacagggaccagggaacggc

SEQ ID NO: 285982 - DNA, 20 bp, synthetic construct
  source 1..20: mol_type = other DNA
ggacagggaccagggaacgg

SEQ ID NO: 285983 - DNA, 20 bp, synthetic construct
  source 1..20: mol_type = other DNA
gggacagggaccagggaacg

SEQ ID NO: 285984 - DNA, 20 bp, synthetic construct
  source 1..20: mol_type = other DNA
tgggacagggaccagggaac

SEQ ID NO: 285985 - DNA, 20 bp, synthetic construct
  source 1..20: mol_type = other DNA
ctgggacagggaccagggaa

SEQ ID NO: 285986 - DNA, 20 bp, synthetic construct
  source 1..20: mol_type = other DNA
gctgggacagggaccaggga

SEQ ID NO: 285987 - DNA, 20 bp, synthetic construct
  source 1..20: mol_type = other DNA
ggctgggacagggaccaggg

SEQ ID NO: 285988 - DNA, 20 bp, synthetic construct
  source 1..20: mol_type = other DNA
gggctgggacagggaccagg

SEQ ID NO: 285989 - DNA, 20 bp, synthetic construct
  source 1..20: mol_type = other DNA
ggggctgggacagggaccag

SEQ ID NO: 285990 - DNA, 20 bp, synthetic construct
  source 1..20: mol_type = other DNA
gggggctgggacagggacca

SEQ ID NO: 285991 - DNA, 20 bp, synthetic construct
  source 1..20: mol_type = other DNA
ggggggctgggacagggacc

SEQ ID NO: 285992 - DNA, 20 bp, synthetic construct
  source 1..20: mol_type = other DNA
aggggggctgggacagggac

SEQ ID NO: 285993 - DNA, 20 bp, synthetic construct
  source 1..20: mol_type = other DNA
gaggggggctgggacaggga

SEQ ID NO: 285994 - DNA, 20 bp, synthetic construct
  source 1..20: mol_type = other DNA
ggaggggggctgggacaggg

SEQ ID NO: 285995 - DNA, 20 bp, synthetic construct
  source 1..20: mol_type = other DNA
gggaggggggctgggacagg

SEQ ID NO: 285996 - DNA, 20 bp, synthetic construct
  source 1..20: mol_type = other DNA
ggggaggggggctgggacag

SEQ ID NO: 285997 - DNA, 20 bp, synthetic construct
  source 1..20: mol_type = other DNA
gggggaggggggctgggaca

SEQ ID NO: 285998 - DNA, 20 bp, synthetic construct
  source 1..20: mol_type = other DNA
agggggaggggggctgggac

SEQ ID NO: 285999 - DNA, 20 bp, synthetic construct
  source 1..20: mol_type = other DNA
gagggggaggggggctggga

SEQ ID NO: 286000 - DNA, 20 bp, synthetic construct
  source 1..20: mol_type = other DNA
agagggggaggggggctggg

SEQ ID NO: 286001 - DNA, 20 bp, synthetic construct
  source 1..20: mol_type = other DNA
gagagggggaggggggctgg

SEQ ID NO: 286002 - DNA, 20 bp, synthetic construct
  source 1..20: mol_type = other DNA
tgagagggggaggggggctg

SEQ ID NO: 286003 - DNA, 20 bp, synthetic construct
  source 1..20: mol_type = other DNA
gtgagagggggaggggggct

SEQ ID NO: 286004 - DNA, 20 bp, synthetic construct
  source 1..20: mol_type = other DNA
cgtgagagggggaggggggc

SEQ ID NO: 286005 - DNA, 20 bp, synthetic construct
  source 1..20: mol_type = other DNA
tcgtgagagggggagggggg

SEQ ID NO: 286006 - DNA, 20 bp, synthetic construct
  source 1..20: mol_type = other DNA
ctcgtgagagggggaggggg

SEQ ID NO: 286007 - DNA, 20 bp, synthetic construct
  source 1..20: mol_type = other DNA
actcgtgagagggggagggg

SEQ ID NO: 286008 - DNA, 20 bp, synthetic construct
  source 1..20: mol_type = other DNA
aactcgtgagagggggaggg

SEQ ID NO: 286009 - DNA, 20 bp, synthetic construct
  source 1..20: mol_type = other DNA
taactcgtgagagggggagg

SEQ ID NO: 286010 - DNA, 20 bp, synthetic construct
  source 1..20: mol_type = other DNA
gtaactcgtgagagggggag

SEQ ID NO: 286011 - DNA, 20 bp, synthetic construct
  source 1..20: mol_type = other DNA
ggtaactcgtgagaggggga

SEQ ID NO: 286012 - DNA, 20 bp, synthetic construct
  source 1..20: mol_type = other DNA
aggtaactcgtgagaggggg

SEQ ID NO: 286013 - DNA, 20 bp, synthetic construct
  source 1..20: mol_type = other DNA
gaggtaactcgtgagagggg

SEQ ID NO: 286014 - DNA, 20 bp, synthetic construct
  source 1..20: mol_type = other DNA
tgaggtaactcgtgagaggg

SEQ ID NO: 286015 - DNA, 20 bp, synthetic construct
  source 1..20: mol_type = other DNA
gtgaggtaactcgtgagagg

SEQ ID NO: 286016 - DNA, 20 bp, synthetic construct
  source 1..20: mol_type = other DNA
ggtgaggtaactcgtgagag

SEQ ID NO: 286017 - DNA, 20 bp, synthetic construct
  source 1..20: mol_type = other DNA
gggtgaggtaactcgtgaga

SEQ ID NO: 286018 - DNA, 20 bp, synthetic construct
  source 1..20: mol_type = other DNA
tgggtgaggtaactcgtgag

SEQ ID NO: 286019 - DNA, 20 bp, synthetic construct
  source 1..20: mol_type = other DNA
ctgggtgaggtaactcgtga

SEQ ID NO: 286020 - DNA, 20 bp, synthetic construct
  source 1..20: mol_type = other DNA
cctgggtgaggtaactcgtg

SEQ ID NO: 286021 - DNA, 20 bp, synthetic construct
  source 1..20: mol_type = other DNA
gcctgggtgaggtaactcgt

SEQ ID NO: 286022 - DNA, 20 bp, synthetic construct
  source 1..20: mol_type = other DNA
ggcctgggtgaggtaactcg

SEQ ID NO: 286023 - DNA, 20 bp, synthetic construct
  source 1..20: mol_type = other DNA
tggcctgggtgaggtaactc

SEQ ID NO: 286024 - DNA, 20 bp, synthetic construct
  source 1..20: mol_type = other DNA
ctggcctgggtgaggtaact

SEQ ID NO: 286025 - DNA, 20 bp, synthetic construct
  source 1..20: mol_type = other DNA
tctggcctgggtgaggtaac

SEQ ID NO: 286026 - DNA, 20 bp, synthetic construct
  source 1..20: mol_type = other DNA
ctctggcctgggtgaggtaa

SEQ ID NO: 286027 - DNA, 20 bp, synthetic construct
  source 1..20: mol_type = other DNA
cctctggcctgggtgaggta

SEQ ID NO: 286028 - DNA, 20 bp, synthetic construct
  source 1..20: mol_type = other DNA
ccctctggcctgggtgaggt

SEQ ID NO: 286029 - DNA, 20 bp, synthetic construct
  source 1..20: mol_type = other DNA
tccctctggcctgggtgagg

SEQ ID NO: 286030 - DNA, 20 bp, synthetic construct
  source 1..20: mol_type = other DNA
ttccctctggcctgggtgag

SEQ ID NO: 286031 - DNA, 20 bp, synthetic construct
  source 1..20: mol_type = other DNA
cttccctctggcctgggtga

SEQ ID NO: 286032 - DNA, 20 bp, synthetic construct
  source 1..20: mol_type = other DNA
tcttccctctggcctgggtg

SEQ ID NO: 286033 - DNA, 20 bp, synthetic construct
  source 1..20: mol_type = other DNA
ctcttccctctggcctgggt

SEQ ID NO: 286034 - DNA, 20 bp, synthetic construct
  source 1..20: mol_type = other DNA
cctcttccctctggcctggg

SEQ ID NO: 286035 - DNA, 20 bp, synthetic construct
  source 1..20: mol_type = other DNA
ccctcttccctctggcctgg

SEQ ID NO: 286036 - DNA, 20 bp, synthetic construct
  source 1..20: mol_type = other DNA
tccctcttccctctggcctg

SEQ ID NO: 286037 - DNA, 20 bp, synthetic construct
  source 1..20: mol_type = other DNA
ttccctcttccctctggcct

SEQ ID NO: 286038 - DNA, 20 bp, synthetic construct
  source 1..20: mol_type = other DNA
cttccctcttccctctggcc

SEQ ID NO: 286039 - DNA, 20 bp, synthetic construct
  source 1..20: mol_type = other DNA
ccttccctcttccctctggc

SEQ ID NO: 286040 - DNA, 20 bp, synthetic construct
  source 1..20: mol_type = other DNA
tccttccctcttccctctgg

SEQ ID NO: 286041 - DNA, 20 bp, synthetic construct
  source 1..20: mol_type = other DNA
ctccttccctcttccctctg

SEQ ID NO: 286042 - DNA, 20 bp, synthetic construct
  source 1..20: mol_type = other DNA
cctccttccctcttccctct

SEQ ID NO: 286043 - DNA, 20 bp, synthetic construct
  source 1..20: mol_type = other DNA
gcctccttccctcttccctc

SEQ ID NO: 286044 - DNA, 20 bp, synthetic construct
  source 1..20: mol_type = other DNA
ggcctccttccctcttccct

SEQ ID NO: 286045 - DNA, 20 bp, synthetic construct
  source 1..20: mol_type = other DNA
gggcctccttccctcttccc

SEQ ID NO: 286046 - DNA, 20 bp, synthetic construct
  source 1..20: mol_type = other DNA
agggcctccttccctcttcc

SEQ ID NO: 286047 - DNA, 20 bp, synthetic construct
  source 1..20: mol_type = other DNA
cagggcctccttccctcttc

SEQ ID NO: 286048 - DNA, 20 bp, synthetic construct
  source 1..20: mol_type = other DNA
ccagggcctccttccctctt

SEQ ID NO: 286049 - DNA, 20 bp, synthetic construct
  source 1..20: mol_type = other DNA
accagggcctccttccctct

SEQ ID NO: 286050 - DNA, 20 bp, synthetic construct
  source 1..20: mol_type = other DNA
gaccagggcctccttccctc

SEQ ID NO: 286051 - DNA, 20 bp, synthetic construct
  source 1..20: mol_type = other DNA
tgaccagggcctccttccct

SEQ ID NO: 286052 - DNA, 20 bp, synthetic construct
  source 1..20: mol_type = other DNA
atgaccagggcctccttccc

SEQ ID NO: 286053 - DNA, 20 bp, synthetic construct
  source 1..20: mol_type = other DNA
tatgaccagggcctccttcc

SEQ ID NO: 286054 - DNA, 20 bp, synthetic construct
  source 1..20: mol_type = other DNA
gtatgaccagggcctccttc

SEQ ID NO: 286055 - DNA, 20 bp, synthetic construct
  source 1..20: mol_type = other DNA
ggtatgaccagggcctcctt

SEQ ID NO: 286056 - DNA, 20 bp, synthetic construct
  source 1..20: mol_type = other DNA
tggtatgaccagggcctcct

SEQ ID NO: 286057 - DNA, 20 bp, synthetic construct
  source 1..20: mol_type = other DNA
ctggtatgaccagggcctcc

SEQ ID NO: 286058 - DNA, 20 bp, synthetic construct
  source 1..20: mol_type = other DNA
gctggtatgaccagggcctc

SEQ ID NO: 286059 - DNA, 20 bp, synthetic construct
  source 1..20: mol_type = other DNA
tgctggtatgaccagggcct

SEQ ID NO: 286060 - DNA, 20 bp, synthetic construct
  source 1..20: mol_type = other DNA
gtgctggtatgaccagggcc

SEQ ID NO: 286061 - DNA, 20 bp, synthetic construct
  source 1..20: mol_type = other DNA
cgtgctggtatgaccagggc

SEQ ID NO: 286062 - DNA, 20 bp, synthetic construct
  source 1..20: mol_type = other DNA
acgtgctggtatgaccaggg

SEQ ID NO: 286063 - DNA, 20 bp, synthetic construct
  source 1..20: mol_type = other DNA
gacgtgctggtatgaccagg

SEQ ID NO: 286064 - DNA, 20 bp, synthetic construct
  source 1..20: mol_type = other DNA
ggacgtgctggtatgaccag

SEQ ID NO: 286065 - DNA, 20 bp, synthetic construct
  source 1..20: mol_type = other DNA
aggacgtgctggtatgacca

SEQ ID NO: 286066 - DNA, 20 bp, synthetic construct
  source 1..20: mol_type = other DNA
gaggacgtgctggtatgacc

SEQ ID NO: 286067 - DNA, 20 bp, synthetic construct
  source 1..20: mol_type = other DNA
ggaggacgtgctggtatgac

SEQ ID NO: 286068 - DNA, 20 bp, synthetic construct
  source 1..20: mol_type = other DNA
gggaggacgtgctggtatga

SEQ ID NO: 286069 - DNA, 20 bp, synthetic construct
  source 1..20: mol_type = other DNA
tgggaggacgtgctggtatg

SEQ ID NO: 286070 - DNA, 20 bp, synthetic construct
  source 1..20: mol_type = other DNA
gtgggaggacgtgctggtat

SEQ ID NO: 286071 - DNA, 20 bp, synthetic construct
  source 1..20: mol_type = other DNA
ggtgggaggacgtgctggta

SEQ ID NO: 286072 - DNA, 20 bp, synthetic construct
  source 1..20: mol_type = other DNA
aggtgggaggacgtgctggt

SEQ ID NO: 286073 - DNA, 20 bp, synthetic construct
  source 1..20: mol_type = other DNA
gaggtgggaggacgtgctgg

SEQ ID NO: 286074 - DNA, 20 bp, synthetic construct
  source 1..20: mol_type = other DNA
ggaggtgggaggacgtgctg

SEQ ID NO: 286075 - DNA, 20 bp, synthetic construct
  source 1..20: mol_type = other DNA
gggaggtgggaggacgtgct

SEQ ID NO: 286076 - DNA, 20 bp, synthetic construct
  source 1..20: mol_type = other DNA
agggaggtgggaggacgtgc

SEQ ID NO: 286077 - DNA, 20 bp, synthetic construct
  source 1..20: mol_type = other DNA
gagggaggtgggaggacgtg

SEQ ID NO: 286078 - DNA, 20 bp, synthetic construct
  source 1..20: mol_type = other DNA
cgagggaggtgggaggacgt

SEQ ID NO: 286079 - DNA, 20 bp, synthetic construct
  source 1..20: mol_type = other DNA
ccgagggaggtgggaggacg

SEQ ID NO: 286080 - DNA, 20 bp, synthetic construct
  source 1..20: mol_type = other DNA
gccgagggaggtgggaggac

SEQ ID NO: 286081 - DNA, 20 bp, synthetic construct
  source 1..20: mol_type = other DNA
ggccgagggaggtgggagga

SEQ ID NO: 286082 - DNA, 20 bp, synthetic construct
  source 1..20: mol_type = other DNA
gggccgagggaggtgggagg

SEQ ID NO: 286083 - DNA, 20 bp, synthetic construct
  source 1..20: mol_type = other DNA
agggccgagggaggtgggag

SEQ ID NO: 286084 - DNA, 20 bp, synthetic construct
  source 1..20: mol_type = other DNA
cagggccgagggaggtggga

SEQ ID NO: 286085 - DNA, 20 bp, synthetic construct
  source 1..20: mol_type = other DNA
ccagggccgagggaggtggg

SEQ ID NO: 286086 - DNA, 20 bp, synthetic construct
  source 1..20: mol_type = other DNA
accagggccgagggaggtgg

SEQ ID NO: 286087 - DNA, 20 bp, synthetic construct
  source 1..20: mol_type = other DNA
gaccagggccgagggaggtg

SEQ ID NO: 286088 - DNA, 20 bp, synthetic construct
  source 1..20: mol_type = other DNA
ggaccagggccgagggaggt

SEQ ID NO: 286089 - DNA, 20 bp, synthetic construct
  source 1..20: mol_type = other DNA
tggaccagggccgagggagg

SEQ ID NO: 286090 - DNA, 20 bp, synthetic construct
  source 1..20: mol_type = other DNA
gtggaccagggccgagggag

SEQ ID NO: 286091 - DNA, 20 bp, synthetic construct
  source 1..20: mol_type = other DNA
ggtggaccagggccgaggga

SEQ ID NO: 286092 - DNA, 20 bp, synthetic construct
  source 1..20: mol_type = other DNA
gggtggaccagggccgaggg

SEQ ID NO: 286093 - DNA, 20 bp, synthetic construct
  source 1..20: mol_type = other DNA
ggggtggaccagggccgagg

SEQ ID NO: 286094 - DNA, 20 bp, synthetic construct
  source 1..20: mol_type = other DNA
gggggtggaccagggccgag

SEQ ID NO: 286095 - DNA, 20 bp, synthetic construct
  source 1..20: mol_type = other DNA
agggggtggaccagggccga

SEQ ID NO: 286096 - DNA, 20 bp, synthetic construct
  source 1..20: mol_type = other DNA
gagggggtggaccagggccg

SEQ ID NO: 286097 - DNA, 20 bp, synthetic construct
  source 1..20: mol_type = other DNA
tgagggggtggaccagggcc

SEQ ID NO: 286098 - DNA, 20 bp, synthetic construct
  source 1..20: mol_type = other DNA
ctgagggggtggaccagggc

SEQ ID NO: 286099 - DNA, 20 bp, synthetic construct
  source 1..20: mol_type = other DNA
actgagggggtggaccaggg

SEQ ID NO: 286100 - DNA, 20 bp, synthetic construct
  source 1..20: mol_type = other DNA
cactgagggggtggaccagg

SEQ ID NO: 286101 - DNA, 20 bp, synthetic construct
  source 1..20: mol_type = other DNA
gcactgagggggtggaccag

SEQ ID NO: 286102 - DNA, 20 bp, synthetic construct
  source 1..20: mol_type = other DNA
agcactgagggggtggacca

SEQ ID NO: 286103 - DNA, 20 bp, synthetic construct
  source 1..20: mol_type = other DNA
cagcactgagggggtggacc

SEQ ID NO: 286104 - DNA, 20 bp, synthetic construct
  source 1..20: mol_type = other DNA
ccagcactgagggggtggac

SEQ ID NO: 286105 - DNA, 20 bp, synthetic construct
  source 1..20: mol_type = other DNA
gccagcactgagggggtgga

SEQ ID NO: 286106 - DNA, 20 bp, synthetic construct
  source 1..20: mol_type = other DNA
ggccagcactgagggggtgg

SEQ ID NO: 286107 - DNA, 20 bp, synthetic construct
  source 1..20: mol_type = other DNA
aggccagcactgagggggtg

SEQ ID NO: 286108 - DNA, 20 bp, synthetic construct
  source 1..20: mol_type = other DNA
gaggccagcactgagggggt

SEQ ID NO: 286109 - DNA, 20 bp, synthetic construct
  source 1..20: mol_type = other DNA
tgaggccagcactgaggggg

SEQ ID NO: 286110 - DNA, 20 bp, synthetic construct
  source 1..20: mol_type = other DNA
ctgaggccagcactgagggg

SEQ ID NO: 286111 - DNA, 20 bp, synthetic construct
  source 1..20: mol_type = other DNA
tctgaggccagcactgaggg

SEQ ID NO: 286112 - DNA, 20 bp, synthetic construct
  source 1..20: mol_type = other DNA
ctctgaggccagcactgagg

SEQ ID NO: 286113 - DNA, 20 bp, synthetic construct
  source 1..20: mol_type = other DNA
gctctgaggccagcactgag

SEQ ID NO: 286114 - DNA, 20 bp, synthetic construct
  source 1..20: mol_type = other DNA
tgctctgaggccagcactga

SEQ ID NO: 286115 - DNA, 20 bp, synthetic construct
  source 1..20: mol_type = other DNA
gtgctctgaggccagcactg

SEQ ID NO: 286116 - DNA, 20 bp, synthetic construct
  source 1..20: mol_type = other DNA
tgtgctctgaggccagcact

SEQ ID NO: 286117 - DNA, 20 bp, synthetic construct
  source 1..20: mol_type = other DNA
ctgtgctctgaggccagcac

SEQ ID NO: 286118 - DNA, 20 bp, synthetic construct
  source 1..20: mol_type = other DNA
gctgtgctctgaggccagca

SEQ ID NO: 286119 - DNA, 20 bp, synthetic construct
  source 1..20: mol_type = other DNA
agctgtgctctgaggccagc

SEQ ID NO: 286120 - DNA, 20 bp, synthetic construct
  source 1..20: mol_type = other DNA
gagctgtgctctgaggccag

SEQ ID NO: 286121 - DNA, 20 bp, synthetic construct
  source 1..20: mol_type = other DNA
agagctgtgctctgaggcca

SEQ ID NO: 286122 - DNA, 20 bp, synthetic construct
  source 1..20: mol_type = other DNA
gagagctgtgctctgaggcc

SEQ ID NO: 286123 - DNA, 20 bp, synthetic construct
  source 1..20: mol_type = other DNA
agagagctgtgctctgaggc

SEQ ID NO: 286124 - DNA, 20 bp, synthetic construct
  source 1..20: mol_type = other DNA
gagagagctgtgctctgagg

SEQ ID NO: 286125 - DNA, 20 bp, synthetic construct
  source 1..20: mol_type = other DNA
ggagagagctgtgctctgag

SEQ ID NO: 286126 - DNA, 20 bp, synthetic construct
  source 1..20: mol_type = other DNA
tggagagagctgtgctctga

SEQ ID NO: 286127 - DNA, 20 bp, synthetic construct
  source 1..20: mol_type = other DNA
ttggagagagctgtgctctg

SEQ ID NO: 286128 - DNA, 20 bp, synthetic construct
  source 1..20: mol_type = other DNA
cttggagagagctgtgctct

SEQ ID NO: 286129 - DNA, 20 bp, synthetic construct
  source 1..20: mol_type = other DNA
gcttggagagagctgtgctc

SEQ ID NO: 286130 - DNA, 20 bp, synthetic construct
  source 1..20: mol_type = other DNA
ggcttggagagagctgtgct

SEQ ID NO: 286131 - DNA, 20 bp, synthetic construct
  source 1..20: mol_type = other DNA
tggcttggagagagctgtgc

SEQ ID NO: 286132 - DNA, 20 bp, synthetic construct
  source 1..20: mol_type = other DNA
ctggcttggagagagctgtg

SEQ ID NO: 286133 - DNA, 20 bp, synthetic construct
  source 1..20: mol_type = other DNA
cctggcttggagagagctgt

SEQ ID NO: 286134 - DNA, 20 bp, synthetic construct
  source 1..20: mol_type = other DNA
gcctggcttggagagagctg

SEQ ID NO: 286135 - DNA, 20 bp, synthetic construct
  source 1..20: mol_type = other DNA
ggcctggcttggagagagct

SEQ ID NO: 286136 - DNA, 20 bp, synthetic construct
  source 1..20: mol_type = other DNA
cggcctggcttggagagagc

SEQ ID NO: 286137 - DNA, 20 bp, synthetic construct
  source 1..20: mol_type = other DNA
gcggcctggcttggagagag

SEQ ID NO: 286138 - DNA, 20 bp, synthetic construct
  source 1..20: mol_type = other DNA
cgcggcctggcttggagaga

SEQ ID NO: 286139 - DNA, 20 bp, synthetic construct
  source 1..20: mol_type = other DNA
gcgcggcctggcttggagag

SEQ ID NO: 286140 - DNA, 20 bp, synthetic construct
  source 1..20: mol_type = other DNA
cgcgcggcctggcttggaga

SEQ ID NO: 286141 - DNA, 20 bp, synthetic construct
  source 1..20: mol_type = other DNA
gcgcgcggcctggcttggag

SEQ ID NO: 286142 - DNA, 20 bp, synthetic construct
  source 1..20: mol_type = other DNA
ggcgcgcggcctggcttgga

SEQ ID NO: 286143 - DNA, 20 bp, synthetic construct
  source 1..20: mol_type = other DNA
tggcgcgcggcctggcttgg

SEQ ID NO: 286144 - DNA, 20 bp, synthetic construct
  source 1..20: mol_type = other DNA
atggcgcgcggcctggcttg

SEQ ID NO: 286145 - DNA, 20 bp, synthetic construct
  source 1..20: mol_type = other DNA
gatggcgcgcggcctggctt

SEQ ID NO: 286146 - DNA, 20 bp, synthetic construct
  source 1..20: mol_type = other DNA
ggatggcgcgcggcctggct

SEQ ID NO: 286147 - DNA, 20 bp, synthetic construct
  source 1..20: mol_type = other DNA
tggatggcgcgcggcctggc

SEQ ID NO: 286148 - DNA, 20 bp, synthetic construct
  source 1..20: mol_type = other DNA
atggatggcgcgcggcctgg

SEQ ID NO: 286149 - DNA, 20 bp, synthetic construct
  source 1..20: mol_type = other DNA
gatggatggcgcgcggcctg

SEQ ID NO: 286150 - DNA, 20 bp, synthetic construct
  source 1..20: mol_type = other DNA
ggatggatggcgcgcggcct

SEQ ID NO: 286151 - DNA, 20 bp, synthetic construct
  source 1..20: mol_type = other DNA
aggatggatggcgcgcggcc

SEQ ID NO: 286152 - DNA, 20 bp, synthetic construct
  source 1..20: mol_type = other DNA
gaggatggatggcgcgcggc

SEQ ID NO: 286153 - DNA, 20 bp, synthetic construct
  source 1..20: mol_type = other DNA
ggaggatggatggcgcgcgg

SEQ ID NO: 286154 - DNA, 20 bp, synthetic construct
  source 1..20: mol_type = other DNA
gggaggatggatggcgcgcg

SEQ ID NO: 286155 - DNA, 20 bp, synthetic construct
  source 1..20: mol_type = other DNA
agggaggatggatggcgcgc

SEQ ID NO: 286156 - DNA, 20 bp, synthetic construct
  source 1..20: mol_type = other DNA
cagggaggatggatggcgcg

SEQ ID NO: 286157 - DNA, 20 bp, synthetic construct
  source 1..20: mol_type = other DNA
acagggaggatggatggcgc

SEQ ID NO: 286158 - DNA, 20 bp, synthetic construct
  source 1..20: mol_type = other DNA
gacagggaggatggatggcg

SEQ ID NO: 286159 - DNA, 20 bp, synthetic construct
  source 1..20: mol_type = other DNA
ggacagggaggatggatggc

SEQ ID NO: 286160 - DNA, 20 bp, synthetic construct
  source 1..20: mol_type = other DNA
gggacagggaggatggatgg

SEQ ID NO: 286161 - DNA, 20 bp, synthetic construct
  source 1..20: mol_type = other DNA
ggggacagggaggatggatg

SEQ ID NO: 286162 - DNA, 20 bp, synthetic construct
  source 1..20: mol_type = other DNA
gggggacagggaggatggat

SEQ ID NO: 286163 - DNA, 20 bp, synthetic construct
  source 1..20: mol_type = other DNA
tgggggacagggaggatgga

SEQ ID NO: 286164 - DNA, 20 bp, synthetic construct
  source 1..20: mol_type = other DNA
ttgggggacagggaggatgg

SEQ ID NO: 286165 - DNA, 20 bp, synthetic construct
  source 1..20: mol_type = other DNA
gttgggggacagggaggatg

SEQ ID NO: 286166 - DNA, 20 bp, synthetic construct
  source 1..20: mol_type = other DNA
cgttgggggacagggaggat

SEQ ID NO: 286167 - DNA, 20 bp, synthetic construct
  source 1..20: mol_type = other DNA
acgttgggggacagggagga

SEQ ID NO: 286168 - DNA, 20 bp, synthetic construct
  source 1..20: mol_type = other DNA
gacgttgggggacagggagg

SEQ ID NO: 286169 - DNA, 20 bp, synthetic construct
  source 1..20: mol_type = other DNA
ggacgttgggggacagggag

SEQ ID NO: 286170 - DNA, 20 bp, synthetic construct
  source 1..20: mol_type = other DNA
aggacgttgggggacaggga

SEQ ID NO: 286171 - DNA, 20 bp, synthetic construct
  source 1..20: mol_type = other DNA
aaggacgttgggggacaggg

SEQ ID NO: 286172 - DNA, 20 bp, synthetic construct
  source 1..20: mol_type = other DNA
caaggacgttgggggacagg

SEQ ID NO: 286173 - DNA, 20 bp, synthetic construct
  source 1..20: mol_type = other DNA
gcaaggacgttgggggacag

SEQ ID NO: 286174 - DNA, 20 bp, synthetic construct
  source 1..20: mol_type = other DNA
ggcaaggacgttgggggaca

SEQ ID NO: 286175 - DNA, 20 bp, synthetic construct
  source 1..20: mol_type = other DNA
tggcaaggacgttgggggac

SEQ ID NO: 286176 - DNA, 20 bp, synthetic construct
  source 1..20: mol_type = other DNA
gtggcaaggacgttggggga

SEQ ID NO: 286177 - DNA, 20 bp, synthetic construct
  source 1..20: mol_type = other DNA
tgtggcaaggacgttggggg

SEQ ID NO: 286178 - DNA, 20 bp, synthetic construct
  source 1..20: mol_type = other DNA
ctgtggcaaggacgttgggg

SEQ ID NO: 286179 - DNA, 20 bp, synthetic construct
  source 1..20: mol_type = other DNA
tctgtggcaaggacgttggg

SEQ ID NO: 286180 - DNA, 20 bp, synthetic construct
  source 1..20: mol_type = other DNA
atctgtggcaaggacgttgg

SEQ ID NO: 286181 - DNA, 20 bp, synthetic construct
  source 1..20: mol_type = other DNA
gatctgtggcaaggacgttg

SEQ ID NO: 286182 - DNA, 20 bp, synthetic construct
  source 1..20: mol_type = other DNA
tgatctgtggcaaggacgtt

SEQ ID NO: 286183 - DNA, 20 bp, synthetic construct
  source 1..20: mol_type = other DNA
atgatctgtggcaaggacgt

SEQ ID NO: 286184 - DNA, 20 bp, synthetic construct
  source 1..20: mol_type = other DNA
catgatctgtggcaaggacg

SEQ ID NO: 286185 - DNA, 20 bp, synthetic construct
  source 1..20: mol_type = other DNA
acatgatctgtggcaaggac

SEQ ID NO: 286186 - DNA, 20 bp, synthetic construct
  source 1..20: mol_type = other DNA
gacatgatctgtggcaagga

SEQ ID NO: 286187 - DNA, 20 bp, synthetic construct
  source 1..20: mol_type = other DNA
ggacatgatctgtggcaagg

SEQ ID NO: 286188 - DNA, 20 bp, synthetic construct
  source 1..20: mol_type = other DNA
cggacatgatctgtggcaag

SEQ ID NO: 286189 - DNA, 20 bp, synthetic construct
  source 1..20: mol_type = other DNA
gcggacatgatctgtggcaa

SEQ ID NO: 286190 - DNA, 20 bp, synthetic construct
  source 1..20: mol_type = other DNA
ggcggacatgatctgtggca

SEQ ID NO: 286191 - DNA, 20 bp, synthetic construct
  source 1..20: mol_type = other DNA
gggcggacatgatctgtggc

SEQ ID NO: 286192 - DNA, 20 bp, synthetic construct
  source 1..20: mol_type = other DNA
agggcggacatgatctgtgg

SEQ ID NO: 286193 - DNA, 20 bp, synthetic construct
  source 1..20: mol_type = other DNA
cagggcggacatgatctgtg

SEQ ID NO: 286194 - DNA, 20 bp, synthetic construct
  source 1..20: mol_type = other DNA
tcagggcggacatgatctgt

SEQ ID NO: 286195 - DNA, 20 bp, synthetic construct
  source 1..20: mol_type = other DNA
gtcagggcggacatgatctg

SEQ ID NO: 286196 - DNA, 20 bp, synthetic construct
  source 1..20: mol_type = other DNA
tgtcagggcggacatgatct

SEQ ID NO: 286197 - DNA, 20 bp, synthetic construct
  source 1..20: mol_type = other DNA
gtgtcagggcggacatgatc

SEQ ID NO: 286198 - DNA, 20 bp, synthetic construct
  source 1..20: mol_type = other DNA
tgtgtcagggcggacatgat

SEQ ID NO: 286199 - DNA, 20 bp, synthetic construct
  source 1..20: mol_type = other DNA
gtgtgtcagggcggacatga

SEQ ID NO: 286200 - DNA, 20 bp, synthetic construct
  source 1..20: mol_type = other DNA
tgtgtgtcagggcggacatg

SEQ ID NO: 286201 - DNA, 20 bp, synthetic construct
  source 1..20: mol_type = other DNA
atgtgtgtcagggcggacat

SEQ ID NO: 286202 - DNA, 20 bp, synthetic construct
  source 1..20: mol_type = other DNA
catgtgtgtcagggcggaca

SEQ ID NO: 286203 - DNA, 20 bp, synthetic construct
  source 1..20: mol_type = other DNA
ccatgtgtgtcagggcggac

SEQ ID NO: 286204 - DNA, 20 bp, synthetic construct
  source 1..20: mol_type = other DNA
cccatgtgtgtcagggcgga

SEQ ID NO: 286205 - DNA, 20 bp, synthetic construct
  source 1..20: mol_type = other DNA
acccatgtgtgtcagggcgg

SEQ ID NO: 286206 - DNA, 20 bp, synthetic construct
  source 1..20: mol_type = other DNA
gacccatgtgtgtcagggcg

SEQ ID NO: 286207 - DNA, 20 bp, synthetic construct
  source 1..20: mol_type = other DNA
agacccatgtgtgtcagggc

SEQ ID NO: 286208 - DNA, 20 bp, synthetic construct
  source 1..20: mol_type = other DNA
gagacccatgtgtgtcaggg

SEQ ID NO: 286209 - DNA, 20 bp, synthetic construct
  source 1..20: mol_type = other DNA
tgagacccatgtgtgtcagg

SEQ ID NO: 286210 - DNA, 20 bp, synthetic construct
  source 1..20: mol_type = other DNA
ctgagacccatgtgtgtcag

SEQ ID NO: 286211 - DNA, 20 bp, synthetic construct
  source 1..20: mol_type = other DNA
gctgagacccatgtgtgtca

SEQ ID NO: 286212 - DNA, 20 bp, synthetic construct
  source 1..20: mol_type = other DNA
ggctgagacccatgtgtgtc

SEQ ID NO: 286213 - DNA, 20 bp, synthetic construct
  source 1..20: mol_type = other DNA
tggctgagacccatgtgtgt

SEQ ID NO: 286214 - DNA, 20 bp, synthetic construct
  source 1..20: mol_type = other DNA
atggctgagacccatgtgtg

SEQ ID NO: 286215 - DNA, 20 bp, synthetic construct
  source 1..20: mol_type = other DNA
gatggctgagacccatgtgt

SEQ ID NO: 286216 - DNA, 20 bp, synthetic construct
  source 1..20: mol_type = other DNA
agatggctgagacccatgtg

SEQ ID NO: 286217 - DNA, 20 bp, synthetic construct
  source 1..20: mol_type = other DNA
gagatggctgagacccatgt

SEQ ID NO: 286218 - DNA, 20 bp, synthetic construct
  source 1..20: mol_type = other DNA
agagatggctgagacccatg

SEQ ID NO: 286219 - DNA, 20 bp, synthetic construct
  source 1..20: mol_type = other DNA
cagagatggctgagacccat

SEQ ID NO: 286220 - DNA, 20 bp, synthetic construct
  source 1..20: mol_type = other DNA
gcagagatggctgagaccca

SEQ ID NO: 286221 - DNA, 20 bp, synthetic construct
  source 1..20: mol_type = other DNA
ggcagagatggctgagaccc

SEQ ID NO: 286222 - DNA, 20 bp, synthetic construct
  source 1..20: mol_type = other DNA
gggcagagatggctgagacc

SEQ ID NO: 286223 - DNA, 20 bp, synthetic construct
  source 1..20: mol_type = other DNA
ggggcagagatggctgagac

SEQ ID NO: 286224 - DNA, 20 bp, synthetic construct
  source 1..20: mol_type = other DNA
tggggcagagatggctgaga

SEQ ID NO: 286225 - DNA, 20 bp, synthetic construct
  source 1..20: mol_type = other DNA
ctggggcagagatggctgag

SEQ ID NO: 286226 - DNA, 20 bp, synthetic construct
  source 1..20: mol_type = other DNA
actggggcagagatggctga

SEQ ID NO: 286227 - DNA, 20 bp, synthetic construct
  source 1..20: mol_type = other DNA
aactggggcagagatggctg

SEQ ID NO: 286228 - DNA, 20 bp, synthetic construct
  source 1..20: mol_type = other DNA
taactggggcagagatggct

SEQ ID NO: 286229 - DNA, 20 bp, synthetic construct
  source 1..20: mol_type = other DNA
ttaactggggcagagatggc

SEQ ID NO: 286230 - DNA, 20 bp, synthetic construct
  source 1..20: mol_type = other DNA
gttaactggggcagagatgg

SEQ ID NO: 286231 - DNA, 20 bp, synthetic construct
  source 1..20: mol_type = other DNA
agttaactggggcagagatg

SEQ ID NO: 286232 - DNA, 20 bp, synthetic construct
  source 1..20: mol_type = other DNA
gagttaactggggcagagat

SEQ ID NO: 286233 - DNA, 20 bp, synthetic construct
  source 1..20: mol_type = other DNA
ggagttaactggggcagaga

SEQ ID NO: 286234 - DNA, 20 bp, synthetic construct
  source 1..20: mol_type = other DNA
gggagttaactggggcagag

SEQ ID NO: 286235 - DNA, 20 bp, synthetic construct
  source 1..20: mol_type = other DNA
ggggagttaactggggcaga

SEQ ID NO: 286236 - DNA, 20 bp, synthetic construct
  source 1..20: mol_type = other DNA
tggggagttaactggggcag

SEQ ID NO: 286237 - DNA, 20 bp, synthetic construct
  source 1..20: mol_type = other DNA
atggggagttaactggggca

SEQ ID NO: 286238 - DNA, 20 bp, synthetic construct
  source 1..20: mol_type = other DNA
gatggggagttaactggggc

SEQ ID NO: 286239 - DNA, 20 bp, synthetic construct
  source 1..20: mol_type = other DNA
ggatggggagttaactgggg

SEQ ID NO: 286240 - DNA, 20 bp, synthetic construct
  source 1..20: mol_type = other DNA
tggatggggagttaactggg

SEQ ID NO: 286241 - DNA, 20 bp, synthetic construct
  source 1..20: mol_type = other DNA
atggatggggagttaactgg

SEQ ID NO: 286242 - DNA, 20 bp, synthetic construct
  source 1..20: mol_type = other DNA
tatggatggggagttaactg

SEQ ID NO: 286243 - DNA, 20 bp, synthetic construct
  source 1..20: mol_type = other DNA
ttatggatggggagttaact

SEQ ID NO: 286244 - DNA, 20 bp, synthetic construct
  source 1..20: mol_type = other DNA
tttatggatggggagttaac

SEQ ID NO: 286245 - DNA, 20 bp, synthetic construct
  source 1..20: mol_type = other DNA
ctttatggatggggagttaa

SEQ ID NO: 286246 - DNA, 20 bp, synthetic construct
  source 1..20: mol_type = other DNA
tctttatggatggggagtta

SEQ ID NO: 286247 - DNA, 20 bp, synthetic construct
  source 1..20: mol_type = other DNA
ctctttatggatggggagtt

SEQ ID NO: 286248 - DNA, 20 bp, synthetic construct
  source 1..20: mol_type = other DNA
gctctttatggatggggagt

SEQ ID NO: 286249 - DNA, 20 bp, synthetic construct
  source 1..20: mol_type = other DNA
tgctctttatggatggggag

SEQ ID NO: 286250 - DNA, 20 bp, synthetic construct
  source 1..20: mol_type = other DNA
gtgctctttatggatgggga

SEQ ID NO: 286251 - DNA, 20 bp, synthetic construct
  source 1..20: mol_type = other DNA
tgtgctctttatggatgggg

SEQ ID NO: 286252 - DNA, 20 bp, synthetic construct
  source 1..20: mol_type = other DNA
atgtgctctttatggatggg

SEQ ID NO: 286253 - DNA, 20 bp, synthetic construct
  source 1..20: mol_type = other DNA
catgtgctctttatggatgg

SEQ ID NO: 286254 - DNA, 20 bp, synthetic construct
  source 1..20: mol_type = other DNA
gcatgtgctctttatggatg

SEQ ID NO: 286255 - DNA, 20 bp, synthetic construct
  source 1..20: mol_type = other DNA
ggcatgtgctctttatggat

SEQ ID NO: 286256 - DNA, 20 bp, synthetic construct
  source 1..20: mol_type = other DNA
tggcatgtgctctttatgga

SEQ ID NO: 286257 - DNA, 20 bp, synthetic construct
  source 1..20: mol_type = other DNA
ctggcatgtgctctttatgg

SEQ ID NO: 286258 - DNA, 20 bp, synthetic construct
  source 1..20: mol_type = other DNA
gctggcatgtgctctttatg

SEQ ID NO: 286259 - DNA, 20 bp, synthetic construct
  source 1..20: mol_type = other DNA
agctggcatgtgctctttat

SEQ ID NO: 286260 - DNA, 20 bp, synthetic construct
  source 1..20: mol_type = other DNA
cagctggcatgtgctcttta

SEQ ID NO: 286261 - DNA, 20 bp, synthetic construct
  source 1..20: mol_type = other DNA
tcagctggcatgtgctcttt

SEQ ID NO: 286262 - DNA, 20 bp, synthetic construct
  source 1..20: mol_type = other DNA
gtcagctggcatgtgctctt

SEQ ID NO: 286263 - DNA, 20 bp, synthetic construct
  source 1..20: mol_type = other DNA
tgtcagctggcatgtgctct

SEQ ID NO: 286264 - DNA, 20 bp, synthetic construct
  source 1..20: mol_type = other DNA
gtgtcagctggcatgtgctc

SEQ ID NO: 286265 - DNA, 20 bp, synthetic construct
  source 1..20: mol_type = other DNA
ggtgtcagctggcatgtgct

SEQ ID NO: 286266 - DNA, 20 bp, synthetic construct
  source 1..20: mol_type = other DNA
tggtgtcagctggcatgtgc

SEQ ID NO: 286267 - DNA, 20 bp, synthetic construct
  source 1..20: mol_type = other DNA
ttggtgtcagctggcatgtg

SEQ ID NO: 286268 - DNA, 20 bp, synthetic construct
  source 1..20: mol_type = other DNA
tttggtgtcagctggcatgt

SEQ ID NO: 286269 - DNA, 20 bp, synthetic construct
  source 1..20: mol_type = other DNA
ttttggtgtcagctggcatg

SEQ ID NO: 286270 - DNA, 20 bp, synthetic construct
  source 1..20: mol_type = other DNA
attttggtgtcagctggcat

SEQ ID NO: 286271 - DNA, 20 bp, synthetic construct
  source 1..20: mol_type = other DNA
tattttggtgtcagctggca

SEQ ID NO: 286272 - DNA, 20 bp, synthetic construct
  source 1..20: mol_type = other DNA
ttattttggtgtcagctggc

SEQ ID NO: 286273 - DNA, 20 bp, synthetic construct
  source 1..20: mol_type = other DNA
attattttggtgtcagctgg

SEQ ID NO: 286274 - DNA, 20 bp, synthetic construct
  source 1..20: mol_type = other DNA
aattattttggtgtcagctg

SEQ ID NO: 286275 - DNA, 20 bp, synthetic construct
  source 1..20: mol_type = other DNA
gaattattttggtgtcagct

SEQ ID NO: 286276 - DNA, 20 bp, synthetic construct
  source 1..20: mol_type = other DNA
cgaattattttggtgtcagc

SEQ ID NO: 286277 - DNA, 20 bp, synthetic construct
  source 1..20: mol_type = other DNA
ccgaattattttggtgtcag

SEQ ID NO: 286278 - DNA, 20 bp, synthetic construct
  source 1..20: mol_type = other DNA
cccgaattattttggtgtca

SEQ ID NO: 286279 - DNA, 20 bp, synthetic construct
  source 1..20: mol_type = other DNA
tcccgaattattttggtgtc

SEQ ID NO: 286280 - DNA, 20 bp, synthetic construct
  source 1..20: mol_type = other DNA
atcccgaattattttggtgt

SEQ ID NO: 286281 - DNA, 20 bp, synthetic construct
  source 1..20: mol_type = other DNA
catcccgaattattttggtg

SEQ ID NO: 286282 - DNA, 20 bp, synthetic construct
  source 1..20: mol_type = other DNA
ccatcccgaattattttggt

SEQ ID NO: 286283 - DNA, 20 bp, synthetic construct
  source 1..20: mol_type = other DNA
accatcccgaattattttgg

SEQ ID NO: 286284 - DNA, 20 bp, synthetic construct
  source 1..20: mol_type = other DNA
aaccatcccgaattattttg

SEQ ID NO: 286285 - DNA, 20 bp, synthetic construct
  source 1..20: mol_type = other DNA
gaaccatcccgaattatttt

SEQ ID NO: 286286 - DNA, 20 bp, synthetic construct
  source 1..20: mol_type = other DNA
ggaaccatcccgaattattt

SEQ ID NO: 286287 - DNA, 20 bp, synthetic construct
  source 1..20: mol_type = other DNA
tggaaccatcccgaattatt

SEQ ID NO: 286288 - DNA, 20 bp, synthetic construct
  source 1..20: mol_type = other DNA
ctggaaccatcccgaattat

SEQ ID NO: 286289 - DNA, 20 bp, synthetic construct
  source 1..20: mol_type = other DNA
actggaaccatcccgaatta

SEQ ID NO: 286290 - DNA, 20 bp, synthetic construct
  source 1..20: mol_type = other DNA
aactggaaccatcccgaatt

SEQ ID NO: 286291 - DNA, 20 bp, synthetic construct
  source 1..20: mol_type = other DNA
aaactggaaccatcccgaat

SEQ ID NO: 286292 - DNA, 20 bp, synthetic construct
  source 1..20: mol_type = other DNA
taaactggaaccatcccgaa

SEQ ID NO: 286293 - DNA, 20 bp, synthetic construct
  source 1..20: mol_type = other DNA
ctaaactggaaccatcccga

SEQ ID NO: 286294 - DNA, 20 bp, synthetic construct
  source 1..20: mol_type = other DNA
tctaaactggaaccatcccg

SEQ ID NO: 286295 - DNA, 20 bp, synthetic construct
  source 1..20: mol_type = other DNA
gtctaaactggaaccatccc

SEQ ID NO: 286296 - DNA, 20 bp, synthetic construct
  source 1..20: mol_type = other DNA
ggtctaaactggaaccatcc

SEQ ID NO: 286297 - DNA, 20 bp, synthetic construct
  source 1..20: mol_type = other DNA
aggtctaaactggaaccatc

SEQ ID NO: 286298 - DNA, 20 bp, synthetic construct
  source 1..20: mol_type = other DNA
taggtctaaactggaaccat

SEQ ID NO: 286299 - DNA, 20 bp, synthetic construct
  source 1..20: mol_type = other DNA
ttaggtctaaactggaacca

SEQ ID NO: 286300 - DNA, 20 bp, synthetic construct
  source 1..20: mol_type = other DNA
cttaggtctaaactggaacc

SEQ ID NO: 286301 - DNA, 20 bp, synthetic construct
  source 1..20: mol_type = other DNA
acttaggtctaaactggaac

SEQ ID NO: 286302 - DNA, 20 bp, synthetic construct
  source 1..20: mol_type = other DNA
cacttaggtctaaactggaa

SEQ ID NO: 286303 - DNA, 20 bp, synthetic construct
  source 1..20: mol_type = other DNA
ccacttaggtctaaactgga

SEQ ID NO: 286304 - DNA, 20 bp, synthetic construct
  source 1..20: mol_type = other DNA
tccacttaggtctaaactgg

SEQ ID NO: 286305 - DNA, 20 bp, synthetic construct
  source 1..20: mol_type = other DNA
ttccacttaggtctaaactg

SEQ ID NO: 286306 - DNA, 20 bp, synthetic construct
  source 1..20: mol_type = other DNA
cttccacttaggtctaaact

SEQ ID NO: 286307 - DNA, 20 bp, synthetic construct
  source 1..20: mol_type = other DNA
ccttccacttaggtctaaac

SEQ ID NO: 286308 - DNA, 20 bp, synthetic construct
  source 1..20: mol_type = other DNA
tccttccacttaggtctaaa

SEQ ID NO: 286309 - DNA, 20 bp, synthetic construct
  source 1..20: mol_type = other DNA
ctccttccacttaggtctaa

SEQ ID NO: 286310 - DNA, 20 bp, synthetic construct
  source 1..20: mol_type = other DNA
tctccttccacttaggtcta

SEQ ID NO: 286311 - DNA, 20 bp, synthetic construct
  source 1..20: mol_type = other DNA
ttctccttccacttaggtct

SEQ ID NO: 286312 - DNA, 20 bp, synthetic construct
  source 1..20: mol_type = other DNA
tttctccttccacttaggtc

SEQ ID NO: 286313 - DNA, 20 bp, synthetic construct
  source 1..20: mol_type = other DNA
gtttctccttccacttaggt

SEQ ID NO: 286314 - DNA, 20 bp, synthetic construct
  source 1..20: mol_type = other DNA
ggtttctccttccacttagg

SEQ ID NO: 286315 - DNA, 20 bp, synthetic construct
  source 1..20: mol_type = other DNA
tggtttctccttccacttag

SEQ ID NO: 286316 - DNA, 20 bp, synthetic construct
  source 1..20: mol_type = other DNA
gtggtttctccttccactta

SEQ ID NO: 286317 - DNA, 20 bp, synthetic construct
  source 1..20: mol_type = other DNA
ggtggtttctccttccactt

SEQ ID NO: 286318 - DNA, 20 bp, synthetic construct
  source 1..20: mol_type = other DNA
tggtggtttctccttccact

SEQ ID NO: 286319 - DNA, 20 bp, synthetic construct
  source 1..20: mol_type = other DNA
gtggtggtttctccttccac

SEQ ID NO: 286320 - DNA, 20 bp, synthetic construct
  source 1..20: mol_type = other DNA
ggtggtggtttctccttcca

SEQ ID NO: 286321 - DNA, 20 bp, synthetic construct
  source 1..20: mol_type = other DNA
aggtggtggtttctccttcc

SEQ ID NO: 286322 - DNA, 20 bp, synthetic construct
  source 1..20: mol_type = other DNA
caggtggtggtttctccttc

SEQ ID NO: 286323 - DNA, 20 bp, synthetic construct
  source 1..20: mol_type = other DNA
gcaggtggtggtttctcctt

SEQ ID NO: 286324 - DNA, 20 bp, synthetic construct
  source 1..20: mol_type = other DNA
ggcaggtggtggtttctcct

SEQ ID NO: 286325 - DNA, 20 bp, synthetic construct
  source 1..20: mol_type = other DNA
gggcaggtggtggtttctcc

SEQ ID NO: 286326 - DNA, 20 bp, synthetic construct
  source 1..20: mol_type = other DNA
agggcaggtggtggtttctc

SEQ ID NO: 286327 - DNA, 20 bp, synthetic construct
  source 1..20: mol_type = other DNA
cagggcaggtggtggtttct

SEQ ID NO: 286328 - DNA, 20 bp, synthetic construct
  source 1..20: mol_type = other DNA
gcagggcaggtggtggtttc

SEQ ID NO: 286329 - DNA, 20 bp, synthetic construct
  source 1..20: mol_type = other DNA
tgcagggcaggtggtggttt

SEQ ID NO: 286330 - DNA, 20 bp, synthetic construct
  source 1..20: mol_type = other DNA
gtgcagggcaggtggtggtt

SEQ ID NO: 286331 - DNA, 20 bp, synthetic construct
  source 1..20: mol_type = other DNA
ggtgcagggcaggtggtggt

SEQ ID NO: 286332 - DNA, 20 bp, synthetic construct
  source 1..20: mol_type = other DNA
aggtgcagggcaggtggtgg

SEQ ID NO: 286333 - DNA, 20 bp, synthetic construct
  source 1..20: mol_type = other DNA
aaggtgcagggcaggtggtg

SEQ ID NO: 286334 - DNA, 20 bp, synthetic construct
  source 1..20: mol_type = other DNA
caaggtgcagggcaggtggt

SEQ ID NO: 286335 - DNA, 20 bp, synthetic construct
  source 1..20: mol_type = other DNA
acaaggtgcagggcaggtgg

SEQ ID NO: 286336 - DNA, 20 bp, synthetic construct
  source 1..20: mol_type = other DNA
aacaaggtgcagggcaggtg

SEQ ID NO: 286337 - DNA, 20 bp, synthetic construct
  source 1..20: mol_type = other DNA
aaacaaggtgcagggcaggt

SEQ ID NO: 286338 - DNA, 20 bp, synthetic construct
  source 1..20: mol_type = other DNA
aaaacaaggtgcagggcagg

SEQ ID NO: 286339 - DNA, 20 bp, synthetic construct
  source 1..20: mol_type = other DNA
aaaaacaaggtgcagggcag

SEQ ID NO: 286340 - DNA, 20 bp, synthetic construct
  source 1..20: mol_type = other DNA
aaaaaacaaggtgcagggca

SEQ ID NO: 286341 - DNA, 20 bp, synthetic construct
  source 1..20: mol_type = other DNA
caaaaaacaaggtgcagggc

SEQ ID NO: 286342 - DNA, 20 bp, synthetic construct
  source 1..20: mol_type = other DNA
ccaaaaaacaaggtgcaggg

SEQ ID NO: 286343 - DNA, 20 bp, synthetic construct
  source 1..20: mol_type = other DNA
accaaaaaacaaggtgcagg

SEQ ID NO: 286344 - DNA, 20 bp, synthetic construct
  source 1..20: mol_type = other DNA
caccaaaaaacaaggtgcag

SEQ ID NO: 286345 - DNA, 20 bp, synthetic construct
  source 1..20: mol_type = other DNA
tcaccaaaaaacaaggtgca

SEQ ID NO: 286346 - DNA, 20 bp, synthetic construct
  source 1..20: mol_type = other DNA
gtcaccaaaaaacaaggtgc

SEQ ID NO: 286347 - DNA, 20 bp, synthetic construct
  source 1..20: mol_type = other DNA
ggtcaccaaaaaacaaggtg

SEQ ID NO: 286348 - DNA, 20 bp, synthetic construct
  source 1..20: mol_type = other DNA
aggtcaccaaaaaacaaggt

SEQ ID NO: 286349 - DNA, 20 bp, synthetic construct
  source 1..20: mol_type = other DNA
aaggtcaccaaaaaacaagg

SEQ ID NO: 286350 - DNA, 20 bp, synthetic construct
  source 1..20: mol_type = other DNA
caaggtcaccaaaaaacaag

SEQ ID NO: 286351 - DNA, 20 bp, synthetic construct
  source 1..20: mol_type = other DNA
tcaaggtcaccaaaaaacaa

SEQ ID NO: 286352 - DNA, 20 bp, synthetic construct
  source 1..20: mol_type = other DNA
atcaaggtcaccaaaaaaca

SEQ ID NO: 286353 - DNA, 20 bp, synthetic construct
  source 1..20: mol_type = other DNA
tatcaaggtcaccaaaaaac

SEQ ID NO: 286354 - DNA, 20 bp, synthetic construct
  source 1..20: mol_type = other DNA
ttatcaaggtcaccaaaaaa

SEQ ID NO: 286355 - DNA, 20 bp, synthetic construct
  source 1..20: mol_type = other DNA
tttatcaaggtcaccaaaaa

SEQ ID NO: 286356 - DNA, 20 bp, synthetic construct
  source 1..20: mol_type = other DNA
gtttatcaaggtcaccaaaa

SEQ ID NO: 286357 - DNA, 20 bp, synthetic construct
  source 1..20: mol_type = other DNA
ggtttatcaaggtcaccaaa

SEQ ID NO: 286358 - DNA, 20 bp, synthetic construct
  source 1..20: mol_type = other DNA
tggtttatcaaggtcaccaa

SEQ ID NO: 286359 - DNA, 20 bp, synthetic construct
  source 1..20: mol_type = other DNA
atggtttatcaaggtcacca

SEQ ID NO: 286360 - DNA, 20 bp, synthetic construct
  source 1..20: mol_type = other DNA
gatggtttatcaaggtcacc

SEQ ID NO: 286361 - DNA, 20 bp, synthetic construct
  source 1..20: mol_type = other DNA
agatggtttatcaaggtcac

SEQ ID NO: 286362 - DNA, 20 bp, synthetic construct
  source 1..20: mol_type = other DNA
aagatggtttatcaaggtca

SEQ ID NO: 286363 - DNA, 20 bp, synthetic construct
  source 1..20: mol_type = other DNA
gaagatggtttatcaaggtc

SEQ ID NO: 286364 - DNA, 20 bp, synthetic construct
  source 1..20: mol_type = other DNA
tgaagatggtttatcaaggt

SEQ ID NO: 286365 - DNA, 20 bp, synthetic construct
  source 1..20: mol_type = other DNA
ctgaagatggtttatcaagg

SEQ ID NO: 286366 - DNA, 20 bp, synthetic construct
  source 1..20: mol_type = other DNA
gctgaagatggtttatcaag

SEQ ID NO: 286367 - DNA, 20 bp, synthetic construct
  source 1..20: mol_type = other DNA
ggctgaagatggtttatcaa

SEQ ID NO: 286368 - DNA, 20 bp, synthetic construct
  source 1..20: mol_type = other DNA
tggctgaagatggtttatca

SEQ ID NO: 286369 - DNA, 20 bp, synthetic construct
  source 1..20: mol_type = other DNA
atggctgaagatggtttatc

SEQ ID NO: 286370 - DNA, 20 bp, synthetic construct
  source 1..20: mol_type = other DNA
catggctgaagatggtttat

SEQ ID NO: 286371 - DNA, 20 bp, synthetic construct
  source 1..20: mol_type = other DNA
tcatggctgaagatggttta

SEQ ID NO: 286372 - DNA, 20 bp, synthetic construct
  source 1..20: mol_type = other DNA
ttcatggctgaagatggttt

SEQ ID NO: 286373 - DNA, 20 bp, synthetic construct
  source 1..20: mol_type = other DNA
cttcatggctgaagatggtt

SEQ ID NO: 286374 - DNA, 20 bp, synthetic construct
  source 1..20: mol_type = other DNA
gcttcatggctgaagatggt

SEQ ID NO: 286375 - DNA, 20 bp, synthetic construct
  source 1..20: mol_type = other DNA
ggcttcatggctgaagatgg

SEQ ID NO: 286376 - DNA, 20 bp, synthetic construct
  source 1..20: mol_type = other DNA
tggcttcatggctgaagatg

SEQ ID NO: 286377 - DNA, 20 bp, synthetic construct
  source 1..20: mol_type = other DNA
ctggcttcatggctgaagat

SEQ ID NO: 286378 - DNA, 20 bp, synthetic construct
  source 1..20: mol_type = other DNA
gctggcttcatggctgaaga

SEQ ID NO: 286379 - DNA, 20 bp, synthetic construct
  source 1..20: mol_type = other DNA
agctggcttcatggctgaag

SEQ ID NO: 286380 - DNA, 20 bp, synthetic construct
  source 1..20: mol_type = other DNA
cagctggcttcatggctgaa

SEQ ID NO: 286381 - DNA, 20 bp, synthetic construct
  source 1..20: mol_type = other DNA
acagctggcttcatggctga

SEQ ID NO: 286382 - DNA, 20 bp, synthetic construct
  source 1..20: mol_type = other DNA
gacagctggcttcatggctg

SEQ ID NO: 286383 - DNA, 20 bp, synthetic construct
  source 1..20: mol_type = other DNA
agacagctggcttcatggct

SEQ ID NO: 286384 - DNA, 20 bp, synthetic construct
  source 1..20: mol_type = other DNA
gagacagctggcttcatggc

SEQ ID NO: 286385 - DNA, 20 bp, synthetic construct
  source 1..20: mol_type = other DNA
ggagacagctggcttcatgg

SEQ ID NO: 286386 - DNA, 20 bp, synthetic construct
  source 1..20: mol_type = other DNA
gggagacagctggcttcatg

SEQ ID NO: 286387 - DNA, 20 bp, synthetic construct
  source 1..20: mol_type = other DNA
tgggagacagctggcttcat

SEQ ID NO: 286388 - DNA, 20 bp, synthetic construct
  source 1..20: mol_type = other DNA
ctgggagacagctggcttca

SEQ ID NO: 286389 - DNA, 20 bp, synthetic construct
  source 1..20: mol_type = other DNA
cctgggagacagctggcttc

SEQ ID NO: 286390 - DNA, 20 bp, synthetic construct
  source 1..20: mol_type = other DNA
tcctgggagacagctggctt

SEQ ID NO: 286391 - DNA, 20 bp, synthetic construct
  source 1..20: mol_type = other DNA
ttcctgggagacagctggct

SEQ ID NO: 286392 - DNA, 20 bp, synthetic construct
  source 1..20: mol_type = other DNA
cttcctgggagacagctggc

SEQ ID NO: 286393 - DNA, 20 bp, synthetic construct
  source 1..20: mol_type = other DNA
gcttcctgggagacagctgg

SEQ ID NO: 286394 - DNA, 20 bp, synthetic construct
  source 1..20: mol_type = other DNA
agcttcctgggagacagctg

SEQ ID NO: 286395 - DNA, 20 bp, synthetic construct
  source 1..20: mol_type = other DNA
gagcttcctgggagacagct

SEQ ID NO: 286396 - DNA, 20 bp, synthetic construct
  source 1..20: mol_type = other DNA
ggagcttcctgggagacagc

SEQ ID NO: 286397 - DNA, 20 bp, synthetic construct
  source 1..20: mol_type = other DNA
tggagcttcctgggagacag

SEQ ID NO: 286398 - DNA, 20 bp, synthetic construct
  source 1..20: mol_type = other DNA
ctggagcttcctgggagaca

SEQ ID NO: 286399 - DNA, 20 bp, synthetic construct
  source 1..20: mol_type = other DNA
cctggagcttcctgggagac

SEQ ID NO: 286400 - DNA, 20 bp, synthetic construct
  source 1..20: mol_type = other DNA
ccctggagcttcctgggaga

SEQ ID NO: 286401 - DNA, 20 bp, synthetic construct
  source 1..20: mol_type = other DNA
gccctggagcttcctgggag

SEQ ID NO: 286402 - DNA, 20 bp, synthetic construct
  source 1..20: mol_type = other DNA
cgccctggagcttcctggga

SEQ ID NO: 286403 - DNA, 20 bp, synthetic construct
  source 1..20: mol_type = other DNA
ccgccctggagcttcctggg

SEQ ID NO: 286404 - DNA, 20 bp, synthetic construct
  source 1..20: mol_type = other DNA
accgccctggagcttcctgg

SEQ ID NO: 286405 - DNA, 20 bp, synthetic construct
  source 1..20: mol_type = other DNA
caccgccctggagcttcctg

SEQ ID NO: 286406 - DNA, 20 bp, synthetic construct
  source 1..20: mol_type = other DNA
gcaccgccctggagcttcct

SEQ ID NO: 286407 - DNA, 20 bp, synthetic construct
  source 1..20: mol_type = other DNA
agcaccgccctggagcttcc

SEQ ID NO: 286408 - DNA, 20 bp, synthetic construct
  source 1..20: mol_type = other DNA
aagcaccgccctggagcttc

SEQ ID NO: 286409 - DNA, 20 bp, synthetic construct
  source 1..20: mol_type = other DNA
gaagcaccgccctggagctt

SEQ ID NO: 286410 - DNA, 20 bp, synthetic construct
  source 1..20: mol_type = other DNA
ggaagcaccgccctggagct

SEQ ID NO: 286411 - DNA, 20 bp, synthetic construct
  source 1..20: mol_type = other DNA
aggaagcaccgccctggagc

SEQ ID NO: 286412 - DNA, 20 bp, synthetic construct
  source 1..20: mol_type = other DNA
gaggaagcaccgccctggag

SEQ ID NO: 286413 - DNA, 20 bp, synthetic construct
  source 1..20: mol_type = other DNA
cgaggaagcaccgccctgga

SEQ ID NO: 286414 - DNA, 20 bp, synthetic construct
  source 1..20: mol_type = other DNA
ccgaggaagcaccgccctgg

SEQ ID NO: 286415 - DNA, 20 bp, synthetic construct
  source 1..20: mol_type = other DNA
cccgaggaagcaccgccctg

SEQ ID NO: 286416 - DNA, 20 bp, synthetic construct
  source 1..20: mol_type = other DNA
tcccgaggaagcaccgccct

SEQ ID NO: 286417 - DNA, 20 bp, synthetic construct
  source 1..20: mol_type = other DNA
ctcccgaggaagcaccgccc

SEQ ID NO: 286418 - DNA, 20 bp, synthetic construct
  source 1..20: mol_type = other DNA
gctcccgaggaagcaccgcc

SEQ ID NO: 286419 - DNA, 20 bp, synthetic construct
  source 1..20: mol_type = other DNA
agctcccgaggaagcaccgc

SEQ ID NO: 286420 - DNA, 20 bp, synthetic construct
  source 1..20: mol_type = other DNA
cagctcccgaggaagcaccg

SEQ ID NO: 286421 - DNA, 20 bp, synthetic construct
  source 1..20: mol_type = other DNA
tcagctcccgaggaagcacc

SEQ ID NO: 286422 - DNA, 20 bp, synthetic construct
  source 1..20: mol_type = other DNA
gtcagctcccgaggaagcac

SEQ ID NO: 286423 - DNA, 20 bp, synthetic construct
  source 1..20: mol_type = other DNA
agtcagctcccgaggaagca

SEQ ID NO: 286424 - DNA, 20 bp, synthetic construct
  source 1..20: mol_type = other DNA
cagtcagctcccgaggaagc

SEQ ID NO: 286425 - DNA, 20 bp, synthetic construct
  source 1..20: mol_type = other DNA
tcagtcagctcccgaggaag

SEQ ID NO: 286426 - DNA, 20 bp, synthetic construct
  source 1..20: mol_type = other DNA
atcagtcagctcccgaggaa

SEQ ID NO: 286427 - DNA, 20 bp, synthetic construct
  source 1..20: mol_type = other DNA
tatcagtcagctcccgagga

SEQ ID NO: 286428 - DNA, 20 bp, synthetic construct
  source 1..20: mol_type = other DNA
ctatcagtcagctcccgagg

SEQ ID NO: 286429 - DNA, 20 bp, synthetic construct
  source 1..20: mol_type = other DNA
cctatcagtcagctcccgag

SEQ ID NO: 286430 - DNA, 20 bp, synthetic construct
  source 1..20: mol_type = other DNA
acctatcagtcagctcccga

SEQ ID NO: 286431 - DNA, 20 bp, synthetic construct
  source 1..20: mol_type = other DNA
cacctatcagtcagctcccg

SEQ ID NO: 286432 - DNA, 20 bp, synthetic construct
  source 1..20: mol_type = other DNA
ccacctatcagtcagctccc

SEQ ID NO: 286433 - DNA, 20 bp, synthetic construct
  source 1..20: mol_type = other DNA
cccacctatcagtcagctcc

SEQ ID NO: 286434 - DNA, 20 bp, synthetic construct
  source 1..20: mol_type = other DNA
tcccacctatcagtcagctc

SEQ ID NO: 286435 - DNA, 20 bp, synthetic construct
  source 1..20: mol_type = other DNA
ctcccacctatcagtcagct

SEQ ID NO: 286436 - DNA, 20 bp, synthetic construct
  source 1..20: mol_type = other DNA
cctcccacctatcagtcagc

SEQ ID NO: 286437 - DNA, 20 bp, synthetic construct
  source 1..20: mol_type = other DNA
acctcccacctatcagtcag

SEQ ID NO: 286438 - DNA, 20 bp, synthetic construct
  source 1..20: mol_type = other DNA
cacctcccacctatcagtca

SEQ ID NO: 286439 - DNA, 20 bp, synthetic construct
  source 1..20: mol_type = other DNA
ccacctcccacctatcagtc

SEQ ID NO: 286440 - DNA, 20 bp, synthetic construct
  source 1..20: mol_type = other DNA
gccacctcccacctatcagt

SEQ ID NO: 286441 - DNA, 20 bp, synthetic construct
  source 1..20: mol_type = other DNA
agccacctcccacctatcag

SEQ ID NO: 286442 - DNA, 20 bp, synthetic construct
  source 1..20: mol_type = other DNA
cagccacctcccacctatca

SEQ ID NO: 286443 - DNA, 20 bp, synthetic construct
  source 1..20: mol_type = other DNA
gcagccacctcccacctatc

SEQ ID NO: 286444 - DNA, 20 bp, synthetic construct
  source 1..20: mol_type = other DNA
ggcagccacctcccacctat

SEQ ID NO: 286445 - DNA, 20 bp, synthetic construct
  source 1..20: mol_type = other DNA
gggcagccacctcccaccta

SEQ ID NO: 286446 - DNA, 20 bp, synthetic construct
  source 1..20: mol_type = other DNA
ggggcagccacctcccacct

SEQ ID NO: 286447 - DNA, 20 bp, synthetic construct
  source 1..20: mol_type = other DNA
gggggcagccacctcccacc

SEQ ID NO: 286448 - DNA, 20 bp, synthetic construct
  source 1..20: mol_type = other DNA
agggggcagccacctcccac

SEQ ID NO: 286449 - DNA, 20 bp, synthetic construct
  source 1..20: mol_type = other DNA
aagggggcagccacctccca

SEQ ID NO: 286450 - DNA, 20 bp, synthetic construct
  source 1..20: mol_type = other DNA
caagggggcagccacctccc

SEQ ID NO: 286451 - DNA, 20 bp, synthetic construct
  source 1..20: mol_type = other DNA
gcaagggggcagccacctcc

SEQ ID NO: 286452 - DNA, 20 bp, synthetic construct
  source 1..20: mol_type = other DNA
tgcaagggggcagccacctc

SEQ ID NO: 286453 - DNA, 20 bp, synthetic construct
  source 1..20: mol_type = other DNA
gtgcaagggggcagccacct

SEQ ID NO: 286454 - DNA, 20 bp, synthetic construct
  source 1..20: mol_type = other DNA
ggtgcaagggggcagccacc

SEQ ID NO: 286455 - DNA, 20 bp, synthetic construct
  source 1..20: mol_type = other DNA
gggtgcaagggggcagccac

SEQ ID NO: 286456 - DNA, 20 bp, synthetic construct
  source 1..20: mol_type = other DNA
agggtgcaagggggcagcca

SEQ ID NO: 286457 - DNA, 20 bp, synthetic construct
  source 1..20: mol_type = other DNA
gagggtgcaagggggcagcc

SEQ ID NO: 286458 - DNA, 20 bp, synthetic construct
  source 1..20: mol_type = other DNA
tgagggtgcaagggggcagc

SEQ ID NO: 286459 - DNA, 20 bp, synthetic construct
  source 1..20: mol_type = other DNA
ctgagggtgcaagggggcag

SEQ ID NO: 286460 - DNA, 20 bp, synthetic construct
  source 1..20: mol_type = other DNA
cctgagggtgcaagggggca

SEQ ID NO: 286461 - DNA, 20 bp, synthetic construct
  source 1..20: mol_type = other DNA
acctgagggtgcaagggggc

SEQ ID NO: 286462 - DNA, 20 bp, synthetic construct
  source 1..20: mol_type = other DNA
cacctgagggtgcaaggggg

SEQ ID NO: 286463 - DNA, 20 bp, synthetic construct
  source 1..20: mol_type = other DNA
tcacctgagggtgcaagggg

SEQ ID NO: 286464 - DNA, 20 bp, synthetic construct
  source 1..20: mol_type = other DNA
gtcacctgagggtgcaaggg

SEQ ID NO: 286465 - DNA, 20 bp, synthetic construct
  source 1..20: mol_type = other DNA
ggtcacctgagggtgcaagg

SEQ ID NO: 286466 - DNA, 20 bp, synthetic construct
  source 1..20: mol_type = other DNA
gggtcacctgagggtgcaag

SEQ ID NO: 286467 - DNA, 20 bp, synthetic construct
  source 1..20: mol_type = other DNA
ggggtcacctgagggtgcaa

SEQ ID NO: 286468 - DNA, 20 bp, synthetic construct
  source 1..20: mol_type = other DNA
tggggtcacctgagggtgca

SEQ ID NO: 286469 - DNA, 20 bp, synthetic construct
  source 1..20: mol_type = other DNA
gtggggtcacctgagggtgc

SEQ ID NO: 286470 - DNA, 20 bp, synthetic construct
  source 1..20: mol_type = other DNA
tgtggggtcacctgagggtg

SEQ ID NO: 286471 - DNA, 20 bp, synthetic construct
  source 1..20: mol_type = other DNA
gtgtggggtcacctgagggt

SEQ ID NO: 286472 - DNA, 20 bp, synthetic construct
  source 1..20: mol_type = other DNA
tgtgtggggtcacctgaggg

SEQ ID NO: 286473 - DNA, 20 bp, synthetic construct
  source 1..20: mol_type = other DNA
ttgtgtggggtcacctgagg

SEQ ID NO: 286474 - DNA, 20 bp, synthetic construct
  source 1..20: mol_type = other DNA
cttgtgtggggtcacctgag

SEQ ID NO: 286475 - DNA, 20 bp, synthetic construct
  source 1..20: mol_type = other DNA
ccttgtgtggggtcacctga

SEQ ID NO: 286476 - DNA, 20 bp, synthetic construct
  source 1..20: mol_type = other DNA
gccttgtgtggggtcacctg

SEQ ID NO: 286477 - DNA, 20 bp, synthetic construct
  source 1..20: mol_type = other DNA
ggccttgtgtggggtcacct

SEQ ID NO: 286478 - DNA, 20 bp, synthetic construct
  source 1..20: mol_type = other DNA
tggccttgtgtggggtcacc

SEQ ID NO: 286479 - DNA, 20 bp, synthetic construct
  source 1..20: mol_type = other DNA
gtggccttgtgtggggtcac

SEQ ID NO: 286480 - DNA, 20 bp, synthetic construct
  source 1..20: mol_type = other DNA
agtggccttgtgtggggtca

SEQ ID NO: 286481 - DNA, 20 bp, synthetic construct
  source 1..20: mol_type = other DNA
cagtggccttgtgtggggtc

SEQ ID NO: 286482 - DNA, 20 bp, synthetic construct
  source 1..20: mol_type = other DNA
gcagtggccttgtgtggggt

SEQ ID NO: 286483 - DNA, 20 bp, synthetic construct
  source 1..20: mol_type = other DNA
agcagtggccttgtgtgggg

SEQ ID NO: 286484 - DNA, 20 bp, synthetic construct
  source 1..20: mol_type = other DNA
cagcagtggccttgtgtggg

SEQ ID NO: 286485 - DNA, 20 bp, synthetic construct
  source 1..20: mol_type = other DNA
ccagcagtggccttgtgtgg

SEQ ID NO: 286486 - DNA, 20 bp, synthetic construct
  source 1..20: mol_type = other DNA
tccagcagtggccttgtgtg

SEQ ID NO: 286487 - DNA, 20 bp, synthetic construct
  source 1..20: mol_type = other DNA
ctccagcagtggccttgtgt

SEQ ID NO: 286488 - DNA, 20 bp, synthetic construct
  source 1..20: mol_type = other DNA
cctccagcagtggccttgtg

SEQ ID NO: 286489 - DNA, 20 bp, synthetic construct
  source 1..20: mol_type = other DNA
gcctccagcagtggccttgt

SEQ ID NO: 286490 - DNA, 20 bp, synthetic construct
  source 1..20: mol_type = other DNA
ggcctccagcagtggccttg

SEQ ID NO: 286491 - DNA, 20 bp, synthetic construct
  source 1..20: mol_type = other DNA
gggcctccagcagtggcctt

SEQ ID NO: 286492 - DNA, 20 bp, synthetic construct
  source 1..20: mol_type = other DNA
agggcctccagcagtggcct

SEQ ID NO: 286493 - DNA, 20 bp, synthetic construct
  source 1..20: mol_type = other DNA
cagggcctccagcagtggcc

SEQ ID NO: 286494 - DNA, 20 bp, synthetic construct
  source 1..20: mol_type = other DNA
ccagggcctccagcagtggc

SEQ ID NO: 286495 - DNA, 20 bp, synthetic construct
  source 1..20: mol_type = other DNA
cccagggcctccagcagtgg

SEQ ID NO: 286496 - DNA, 20 bp, synthetic construct
  source 1..20: mol_type = other DNA
ccccagggcctccagcagtg

SEQ ID NO: 286497 - DNA, 20 bp, synthetic construct
  source 1..20: mol_type = other DNA
tccccagggcctccagcagt

SEQ ID NO: 286498 - DNA, 20 bp, synthetic construct
  source 1..20: mol_type = other DNA
gtccccagggcctccagcag

SEQ ID NO: 286499 - DNA, 20 bp, synthetic construct
  source 1..20: mol_type = other DNA
agtccccagggcctccagca

SEQ ID NO: 286500 - DNA, 20 bp, synthetic construct
  source 1..20: mol_type = other DNA
gagtccccagggcctccagc

SEQ ID NO: 286501 - DNA, 20 bp, synthetic construct
  source 1..20: mol_type = other DNA
ggagtccccagggcctccag

SEQ ID NO: 286502 - DNA, 20 bp, synthetic construct
  source 1..20: mol_type = other DNA
tggagtccccagggcctcca

SEQ ID NO: 286503 - DNA, 20 bp, synthetic construct
  source 1..20: mol_type = other DNA
ctggagtccccagggcctcc

SEQ ID NO: 286504 - DNA, 20 bp, synthetic construct
  source 1..20: mol_type = other DNA
cctggagtccccagggcctc

SEQ ID NO: 286505 - DNA, 20 bp, synthetic construct
  source 1..20: mol_type = other DNA
tcctggagtccccagggcct

SEQ ID NO: 286506 - DNA, 20 bp, synthetic construct
  source 1..20: mol_type = other DNA
ttcctggagtccccagggcc

SEQ ID NO: 286507 - DNA, 20 bp, synthetic construct
  source 1..20: mol_type = other DNA
attcctggagtccccagggc

SEQ ID NO: 286508 - DNA, 20 bp, synthetic construct
  source 1..20: mol_type = other DNA
cattcctggagtccccaggg

SEQ ID NO: 286509 - DNA, 20 bp, synthetic construct
  source 1..20: mol_type = other DNA
acattcctggagtccccagg

SEQ ID NO: 286510 - DNA, 20 bp, synthetic construct
  source 1..20: mol_type = other DNA
gacattcctggagtccccag

SEQ ID NO: 286511 - DNA, 20 bp, synthetic construct
  source 1..20: mol_type = other DNA
tgacattcctggagtcccca

SEQ ID NO: 286512 - DNA, 20 bp, synthetic construct
  source 1..20: mol_type = other DNA
ttgacattcctggagtcccc

SEQ ID NO: 286513 - DNA, 20 bp, synthetic construct
  source 1..20: mol_type = other DNA
attgacattcctggagtccc

SEQ ID NO: 286514 - DNA, 20 bp, synthetic construct
  source 1..20: mol_type = other DNA
gattgacattcctggagtcc

SEQ ID NO: 286515 - DNA, 20 bp, synthetic construct
  source 1..20: mol_type = other DNA
tgattgacattcctggagtc

SEQ ID NO: 286516 - DNA, 20 bp, synthetic construct
  source 1..20: mol_type = other DNA
ctgattgacattcctggagt

SEQ ID NO: 286517 - DNA, 20 bp, synthetic construct
  source 1..20: mol_type = other DNA
actgattgacattcctggag

SEQ ID NO: 286518 - DNA, 20 bp, synthetic construct
  source 1..20: mol_type = other DNA
cactgattgacattcctgga

SEQ ID NO: 286519 - DNA, 20 bp, synthetic construct
  source 1..20: mol_type = other DNA
tcactgattgacattcctgg

SEQ ID NO: 286520 - DNA, 20 bp, synthetic construct
  source 1..20: mol_type = other DNA
gtcactgattgacattcctg

SEQ ID NO: 286521 - DNA, 20 bp, synthetic construct
  source 1..20: mol_type = other DNA
ggtcactgattgacattcct

SEQ ID NO: 286522 - DNA, 20 bp, synthetic construct
  source 1..20: mol_type = other DNA
aggtcactgattgacattcc

SEQ ID NO: 286523 - DNA, 20 bp, synthetic construct
  source 1..20: mol_type = other DNA
caggtcactgattgacattc

SEQ ID NO: 286524 - DNA, 20 bp, synthetic construct
  source 1..20: mol_type = other DNA
gcaggtcactgattgacatt

SEQ ID NO: 286525 - DNA, 20 bp, synthetic construct
  source 1..20: mol_type = other DNA
ggcaggtcactgattgacat

SEQ ID NO: 286526 - DNA, 20 bp, synthetic construct
  source 1..20: mol_type = other DNA
gggcaggtcactgattgaca

SEQ ID NO: 286527 - DNA, 20 bp, synthetic construct
  source 1..20: mol_type = other DNA
ggggcaggtcactgattgac

SEQ ID NO: 286528 - DNA, 20 bp, synthetic construct
  source 1..20: mol_type = other DNA
gggggcaggtcactgattga

SEQ ID NO: 286529 - DNA, 20 bp, synthetic construct
  source 1..20: mol_type = other DNA
ggggggcaggtcactgattg

SEQ ID NO: 286530 - DNA, 20 bp, synthetic construct
  source 1..20: mol_type = other DNA
tggggggcaggtcactgatt

SEQ ID NO: 286531 - DNA, 20 bp, synthetic construct
  source 1..20: mol_type = other DNA
ctggggggcaggtcactgat

SEQ ID NO: 286532 - DNA, 20 bp, synthetic construct
  source 1..20: mol_type = other DNA
cctggggggcaggtcactga

SEQ ID NO: 286533 - DNA, 20 bp, synthetic construct
  source 1..20: mol_type = other DNA
gcctggggggcaggtcactg

SEQ ID NO: 286534 - DNA, 20 bp, synthetic construct
  source 1..20: mol_type = other DNA
ggcctggggggcaggtcact

SEQ ID NO: 286535 - DNA, 20 bp, synthetic construct
  source 1..20: mol_type = other DNA
gggcctggggggcaggtcac

SEQ ID NO: 286536 - DNA, 20 bp, synthetic construct
  source 1..20: mol_type = other DNA
ggggcctggggggcaggtca

SEQ ID NO: 286537 - DNA, 20 bp, synthetic construct
  source 1..20: mol_type = other DNA
tggggcctggggggcaggtc

SEQ ID NO: 286538 - DNA, 20 bp, synthetic construct
  source 1..20: mol_type = other DNA
gtggggcctggggggcaggt

SEQ ID NO: 286539 - DNA, 20 bp, synthetic construct
  source 1..20: mol_type = other DNA
tgtggggcctggggggcagg

SEQ ID NO: 286540 - DNA, 20 bp, synthetic construct
  source 1..20: mol_type = other DNA
gtgtggggcctggggggcag

SEQ ID NO: 286541 - DNA, 20 bp, synthetic construct
  source 1..20: mol_type = other DNA
tgtgtggggcctggggggca

SEQ ID NO: 286542 - DNA, 20 bp, synthetic construct
  source 1..20: mol_type = other DNA
ctgtgtggggcctggggggc

SEQ ID NO: 286543 - DNA, 20 bp, synthetic construct
  source 1..20: mol_type = other DNA
gctgtgtggggcctgggggg

SEQ ID NO: 286544 - DNA, 20 bp, synthetic construct
  source 1..20: mol_type = other DNA
ggctgtgtggggcctggggg

SEQ ID NO: 286545 - DNA, 20 bp, synthetic construct
  source 1..20: mol_type = other DNA
tggctgtgtggggcctgggg

SEQ ID NO: 286546 - DNA, 20 bp, synthetic construct
  source 1..20: mol_type = other DNA
atggctgtgtggggcctggg

SEQ ID NO: 286547 - DNA, 20 bp, synthetic construct
  source 1..20: mol_type = other DNA
catggctgtgtggggcctgg

SEQ ID NO: 286548 - DNA, 20 bp, synthetic construct
  source 1..20: mol_type = other DNA
ccatggctgtgtggggcctg

SEQ ID NO: 286549 - DNA, 20 bp, synthetic construct
  source 1..20: mol_type = other DNA
gccatggctgtgtggggcct

SEQ ID NO: 286550 - DNA, 20 bp, synthetic construct
  source 1..20: mol_type = other DNA
agccatggctgtgtggggcc

SEQ ID NO: 286551 - DNA, 20 bp, synthetic construct
  source 1..20: mol_type = other DNA
cagccatggctgtgtggggc

SEQ ID NO: 286552 - DNA, 20 bp, synthetic construct
  source 1..20: mol_type = other DNA
gcagccatggctgtgtgggg

SEQ ID NO: 286553 - DNA, 20 bp, synthetic construct
  source 1..20: mol_type = other DNA
tgcagccatggctgtgtggg

SEQ ID NO: 286554 - DNA, 20 bp, synthetic construct
  source 1..20: mol_type = other DNA
atgcagccatggctgtgtgg

SEQ ID NO: 286555 - DNA, 20 bp, synthetic construct
  source 1..20: mol_type = other DNA
tatgcagccatggctgtgtg

SEQ ID NO: 286556 - DNA, 20 bp, synthetic construct
  source 1..20: mol_type = other DNA
ctatgcagccatggctgtgt

SEQ ID NO: 286557 - DNA, 20 bp, synthetic construct
  source 1..20: mol_type = other DNA
tctatgcagccatggctgtg

SEQ ID NO: 286558 - DNA, 20 bp, synthetic construct
  source 1..20: mol_type = other DNA
ctctatgcagccatggctgt

SEQ ID NO: 286559 - DNA, 20 bp, synthetic construct
  source 1..20: mol_type = other DNA
cctctatgcagccatggctg

SEQ ID NO: 286560 - DNA, 20 bp, synthetic construct
  source 1..20: mol_type = other DNA
gcctctatgcagccatggct

SEQ ID NO: 286561 - DNA, 20 bp, synthetic construct
  source 1..20: mol_type = other DNA
ggcctctatgcagccatggc

SEQ ID NO: 286562 - DNA, 20 bp, synthetic construct
  source 1..20: mol_type = other DNA
aggcctctatgcagccatgg

SEQ ID NO: 286563 - DNA, 20 bp, synthetic construct
  source 1..20: mol_type = other DNA
caggcctctatgcagccatg

SEQ ID NO: 286564 - DNA, 20 bp, synthetic construct
  source 1..20: mol_type = other DNA
gcaggcctctatgcagccat

SEQ ID NO: 286565 - DNA, 20 bp, synthetic construct
  source 1..20: mol_type = other DNA
ggcaggcctctatgcagcca

SEQ ID NO: 286566 - DNA, 20 bp, synthetic construct
  source 1..20: mol_type = other DNA
aggcaggcctctatgcagcc

SEQ ID NO: 286567 - DNA, 20 bp, synthetic construct
  source 1..20: mol_type = other DNA
gaggcaggcctctatgcagc

SEQ ID NO: 286568 - DNA, 20 bp, synthetic construct
  source 1..20: mol_type = other DNA
ggaggcaggcctctatgcag

SEQ ID NO: 286569 - DNA, 20 bp, synthetic construct
  source 1..20: mol_type = other DNA
tggaggcaggcctctatgca

SEQ ID NO: 286570 - DNA, 20 bp, synthetic construct
  source 1..20: mol_type = other DNA
ttggaggcaggcctctatgc

SEQ ID NO: 286571 - DNA, 20 bp, synthetic construct
  source 1..20: mol_type = other DNA
cttggaggcaggcctctatg

SEQ ID NO: 286572 - DNA, 20 bp, synthetic construct
  source 1..20: mol_type = other DNA
ccttggaggcaggcctctat

SEQ ID NO: 286573 - DNA, 20 bp, synthetic construct
  source 1..20: mol_type = other DNA
cccttggaggcaggcctcta

SEQ ID NO: 286574 - DNA, 20 bp, synthetic construct
  source 1..20: mol_type = other DNA
tcccttggaggcaggcctct

SEQ ID NO: 286575 - DNA, 20 bp, synthetic construct
  source 1..20: mol_type = other DNA
gtcccttggaggcaggcctc

SEQ ID NO: 286576 - DNA, 20 bp, synthetic construct
  source 1..20: mol_type = other DNA
ggtcccttggaggcaggcct

SEQ ID NO: 286577 - DNA, 20 bp, synthetic construct
  source 1..20: mol_type = other DNA
aggtcccttggaggcaggcc

SEQ ID NO: 286578 - DNA, 20 bp, synthetic construct
  source 1..20: mol_type = other DNA
caggtcccttggaggcaggc

SEQ ID NO: 286579 - DNA, 20 bp, synthetic construct
  source 1..20: mol_type = other DNA
acaggtcccttggaggcagg

SEQ ID NO: 286580 - DNA, 20 bp, synthetic construct
  source 1..20: mol_type = other DNA
gacaggtcccttggaggcag

SEQ ID NO: 286581 - DNA, 20 bp, synthetic construct
  source 1..20: mol_type = other DNA
agacaggtcccttggaggca

SEQ ID NO: 286582 - DNA, 20 bp, synthetic construct
  source 1..20: mol_type = other DNA
cagacaggtcccttggaggc

SEQ ID NO: 286583 - DNA, 20 bp, synthetic construct
  source 1..20: mol_type = other DNA
acagacaggtcccttggagg

SEQ ID NO: 286584 - DNA, 20 bp, synthetic construct
  source 1..20: mol_type = other DNA
gacagacaggtcccttggag

SEQ ID NO: 286585 - DNA, 20 bp, synthetic construct
  source 1..20: mol_type = other DNA
agacagacaggtcccttgga

SEQ ID NO: 286586 - DNA, 20 bp, synthetic construct
  source 1..20: mol_type = other DNA
cagacagacaggtcccttgg

SEQ ID NO: 286587 - DNA, 20 bp, synthetic construct
  source 1..20: mol_type = other DNA
gcagacagacaggtcccttg

SEQ ID NO: 286588 - DNA, 20 bp, synthetic construct
  source 1..20: mol_type = other DNA
ggcagacagacaggtccctt

SEQ ID NO: 286589 - DNA, 20 bp, synthetic construct
  source 1..20: mol_type = other DNA
tggcagacagacaggtccct

SEQ ID NO: 286590 - DNA, 20 bp, synthetic construct
  source 1..20: mol_type = other DNA
gtggcagacagacaggtccc

SEQ ID NO: 286591 - DNA, 20 bp, synthetic construct
  source 1..20: mol_type = other DNA
agtggcagacagacaggtcc

SEQ ID NO: 286592 - DNA, 20 bp, synthetic construct
  source 1..20: mol_type = other DNA
cagtggcagacagacaggtc

SEQ ID NO: 286593 - DNA, 20 bp, synthetic construct
  source 1..20: mol_type = other DNA
acagtggcagacagacaggt

SEQ ID NO: 286594 - DNA, 20 bp, synthetic construct
  source 1..20: mol_type = other DNA
cacagtggcagacagacagg

SEQ ID NO: 286595 - DNA, 20 bp, synthetic construct
  source 1..20: mol_type = other DNA
ccacagtggcagacagacag

SEQ ID NO: 286596 - DNA, 20 bp, synthetic construct
  source 1..20: mol_type = other DNA
tccacagtggcagacagaca

SEQ ID NO: 286597 - DNA, 20 bp, synthetic construct
  source 1..20: mol_type = other DNA
ctccacagtggcagacagac

SEQ ID NO: 286598 - DNA, 20 bp, synthetic construct
  source 1..20: mol_type = other DNA
actccacagtggcagacaga

SEQ ID NO: 286599 - DNA, 20 bp, synthetic construct
  source 1..20: mol_type = other DNA
gactccacagtggcagacag

SEQ ID NO: 286600 - DNA, 20 bp, synthetic construct
  source 1..20: mol_type = other DNA
ggactccacagtggcagaca

SEQ ID NO: 286601 - DNA, 20 bp, synthetic construct
  source 1..20: mol_type = other DNA
gggactccacagtggcagac

SEQ ID NO: 286602 - DNA, 20 bp, synthetic construct
  source 1..20: mol_type = other DNA
agggactccacagtggcaga

SEQ ID NO: 286603 - DNA, 20 bp, synthetic construct
  source 1..20: mol_type = other DNA
tagggactccacagtggcag

SEQ ID NO: 286604 - DNA, 20 bp, synthetic construct
  source 1..20: mol_type = other DNA
gtagggactccacagtggca

SEQ ID NO: 286605 - DNA, 20 bp, synthetic construct
  source 1..20: mol_type = other DNA
tgtagggactccacagtggc

SEQ ID NO: 286606 - DNA, 20 bp, synthetic construct
  source 1..20: mol_type = other DNA
ctgtagggactccacagtgg

SEQ ID NO: 286607 - DNA, 20 bp, synthetic construct
  source 1..20: mol_type = other DNA
gctgtagggactccacagtg

SEQ ID NO: 286608 - DNA, 20 bp, synthetic construct
  source 1..20: mol_type = other DNA
cgctgtagggactccacagt

SEQ ID NO: 286609 - DNA, 20 bp, synthetic construct
  source 1..20: mol_type = other DNA
acgctgtagggactccacag

SEQ ID NO: 286610 - DNA, 20 bp, synthetic construct
  source 1..20: mol_type = other DNA
cacgctgtagggactccaca

SEQ ID NO: 286611 - DNA, 20 bp, synthetic construct
  source 1..20: mol_type = other DNA
gcacgctgtagggactccac

SEQ ID NO: 286612 - DNA, 20 bp, synthetic construct
  source 1..20: mol_type = other DNA
ggcacgctgtagggactcca

SEQ ID NO: 286613 - DNA, 20 bp, synthetic construct
  source 1..20: mol_type = other DNA
gggcacgctgtagggactcc

SEQ ID NO: 286614 - DNA, 20 bp, synthetic construct
  source 1..20: mol_type = other DNA
ggggcacgctgtagggactc

SEQ ID NO: 286615 - DNA, 20 bp, synthetic construct
  source 1..20: mol_type = other DNA
gggggcacgctgtagggact

SEQ ID NO: 286616 - DNA, 20 bp, synthetic construct
  source 1..20: mol_type = other DNA
ggggggcacgctgtagggac

SEQ ID NO: 286617 - DNA, 20 bp, synthetic construct
  source 1..20: mol_type = other DNA
tggggggcacgctgtaggga

SEQ ID NO: 286618 - DNA, 20 bp, synthetic construct
  source 1..20: mol_type = other DNA
gtggggggcacgctgtaggg

SEQ ID NO: 286619 - DNA, 20 bp, synthetic construct
  source 1..20: mol_type = other DNA
tgtggggggcacgctgtagg

SEQ ID NO: 286620 - DNA, 20 bp, synthetic construct
  source 1..20: mol_type = other DNA
ctgtggggggcacgctgtag

SEQ ID NO: 286621 - DNA, 20 bp, synthetic construct
  source 1..20: mol_type = other DNA
cctgtggggggcacgctgta

SEQ ID NO: 286622 - DNA, 20 bp, synthetic construct
  source 1..20: mol_type = other DNA
ccctgtggggggcacgctgt

SEQ ID NO: 286623 - DNA, 20 bp, synthetic construct
  source 1..20: mol_type = other DNA
cccctgtggggggcacgctg

SEQ ID NO: 286624 - DNA, 20 bp, synthetic construct
  source 1..20: mol_type = other DNA
tcccctgtggggggcacgct

SEQ ID NO: 286625 - DNA, 20 bp, synthetic construct
  source 1..20: mol_type = other DNA
ctcccctgtggggggcacgc

SEQ ID NO: 286626 - DNA, 20 bp, synthetic construct
  source 1..20: mol_type = other DNA
gctcccctgtggggggcacg

SEQ ID NO: 286627 - DNA, 20 bp, synthetic construct
  source 1..20: mol_type = other DNA
agctcccctgtggggggcac

SEQ ID NO: 286628 - DNA, 20 bp, synthetic construct
  source 1..20: mol_type = other DNA
cagctcccctgtggggggca

SEQ ID NO: 286629 - DNA, 20 bp, synthetic construct
  source 1..20: mol_type = other DNA
ccagctcccctgtggggggc

SEQ ID NO: 286630 - DNA, 20 bp, synthetic construct
  source 1..20: mol_type = other DNA
accagctcccctgtgggggg

SEQ ID NO: 286631 - DNA, 20 bp, synthetic construct
  source 1..20: mol_type = other DNA
aaccagctcccctgtggggg

SEQ ID NO: 286632 - DNA, 20 bp, synthetic construct
  source 1..20: mol_type = other DNA
gaaccagctcccctgtgggg

SEQ ID NO: 286633 - DNA, 20 bp, synthetic construct
  source 1..20: mol_type = other DNA
agaaccagctcccctgtggg

SEQ ID NO: 286634 - DNA, 20 bp, synthetic construct
  source 1..20: mol_type = other DNA
aagaaccagctcccctgtgg

SEQ ID NO: 286635 - DNA, 20 bp, synthetic construct
  source 1..20: mol_type = other DNA
aaagaaccagctcccctgtg

SEQ ID NO: 286636 - DNA, 20 bp, synthetic construct
  source 1..20: mol_type = other DNA
caaagaaccagctcccctgt

SEQ ID NO: 286637 - DNA, 20 bp, synthetic construct
  source 1..20: mol_type = other DNA
tcaaagaaccagctcccctg

SEQ ID NO: 286638 - DNA, 20 bp, synthetic construct
  source 1..20: mol_type = other DNA
gtcaaagaaccagctcccct

SEQ ID NO: 286639 - DNA, 20 bp, synthetic construct
  source 1..20: mol_type = other DNA
agtcaaagaaccagctcccc

SEQ ID NO: 286640 - DNA, 20 bp, synthetic construct
  source 1..20: mol_type = other DNA
cagtcaaagaaccagctccc

SEQ ID NO: 286641 - DNA, 20 bp, synthetic construct
  source 1..20: mol_type = other DNA
tcagtcaaagaaccagctcc

SEQ ID NO: 286642 - DNA, 20 bp, synthetic construct
  source 1..20: mol_type = other DNA
ctcagtcaaagaaccagctc

SEQ ID NO: 286643 - DNA, 20 bp, synthetic construct
  source 1..20: mol_type = other DNA
tctcagtcaaagaaccagct

SEQ ID NO: 286644 - DNA, 20 bp, synthetic construct
  source 1..20: mol_type = other DNA
atctcagtcaaagaaccagc

SEQ ID NO: 286645 - DNA, 20 bp, synthetic construct
  source 1..20: mol_type = other DNA
gatctcagtcaaagaaccag

SEQ ID NO: 286646 - DNA, 20 bp, synthetic construct
  source 1..20: mol_type = other DNA
tgatctcagtcaaagaacca

SEQ ID NO: 286647 - DNA, 20 bp, synthetic construct
  source 1..20: mol_type = other DNA
ctgatctcagtcaaagaacc

SEQ ID NO: 286648 - DNA, 20 bp, synthetic construct
  source 1..20: mol_type = other DNA
gctgatctcagtcaaagaac

SEQ ID NO: 286649 - DNA, 20 bp, synthetic construct
  source 1..20: mol_type = other DNA
agctgatctcagtcaaagaa

SEQ ID NO: 286650 - DNA, 20 bp, synthetic construct
  source 1..20: mol_type = other DNA
cagctgatctcagtcaaaga

SEQ ID NO: 286651 - DNA, 20 bp, synthetic construct
  source 1..20: mol_type = other DNA
ccagctgatctcagtcaaag

SEQ ID NO: 286652 - DNA, 20 bp, synthetic construct
  source 1..20: mol_type = other DNA
gccagctgatctcagtcaaa

SEQ ID NO: 286653 - DNA, 20 bp, synthetic construct
  source 1..20: mol_type = other DNA
tgccagctgatctcagtcaa

SEQ ID NO: 286654 - DNA, 20 bp, synthetic construct
  source 1..20: mol_type = other DNA
ctgccagctgatctcagtca

SEQ ID NO: 286655 - DNA, 20 bp, synthetic construct
  source 1..20: mol_type = other DNA
gctgccagctgatctcagtc

SEQ ID NO: 286656 - DNA, 20 bp, synthetic construct
  source 1..20: mol_type = other DNA
agctgccagctgatctcagt

SEQ ID NO: 286657 - DNA, 20 bp, synthetic construct
  source 1..20: mol_type = other DNA
gagctgccagctgatctcag

SEQ ID NO: 286658 - DNA, 20 bp, synthetic construct
  source 1..20: mol_type = other DNA
tgagctgccagctgatctca

SEQ ID NO: 286659 - DNA, 20 bp, synthetic construct
  source 1..20: mol_type = other DNA
ctgagctgccagctgatctc

SEQ ID NO: 286660 - DNA, 20 bp, synthetic construct
  source 1..20: mol_type = other DNA
cctgagctgccagctgatct

SEQ ID NO: 286661 - DNA, 20 bp, synthetic construct
  source 1..20: mol_type = other DNA
ccctgagctgccagctgatc

SEQ ID NO: 286662 - DNA, 20 bp, synthetic construct
  source 1..20: mol_type = other DNA
accctgagctgccagctgat

SEQ ID NO: 286663 - DNA, 20 bp, synthetic construct
  source 1..20: mol_type = other DNA
gaccctgagctgccagctga

SEQ ID NO: 286664 - DNA, 20 bp, synthetic construct
  source 1..20: mol_type = other DNA
tgaccctgagctgccagctg

SEQ ID NO: 286665 - DNA, 20 bp, synthetic construct
  source 1..20: mol_type = other DNA
atgaccctgagctgccagct

SEQ ID NO: 286666 - DNA, 20 bp, synthetic construct
  source 1..20: mol_type = other DNA
gatgaccctgagctgccagc

SEQ ID NO: 286667 - DNA, 20 bp, synthetic construct
  source 1..20: mol_type = other DNA
tgatgaccctgagctgccag

SEQ ID NO: 286668 - DNA, 20 bp, synthetic construct
  source 1..20: mol_type = other DNA
atgatgaccctgagctgcca

SEQ ID NO: 286669 - DNA, 20 bp, synthetic construct
  source 1..20: mol_type = other DNA
aatgatgaccctgagctgcc

SEQ ID NO: 286670 - DNA, 20 bp, synthetic construct
  source 1..20: mol_type = other DNA
gaatgatgaccctgagctgc

SEQ ID NO: 286671 - DNA, 20 bp, synthetic construct
  source 1..20: mol_type = other DNA
ggaatgatgaccctgagctg

SEQ ID NO: 286672 - DNA, 20 bp, synthetic construct
  source 1..20: mol_type = other DNA
gggaatgatgaccctgagct

SEQ ID NO: 286673 - DNA, 20 bp, synthetic construct
  source 1..20: mol_type = other DNA
tgggaatgatgaccctgagc

SEQ ID NO: 286674 - DNA, 20 bp, synthetic construct
  source 1..20: mol_type = other DNA
ctgggaatgatgaccctgag

SEQ ID NO: 286675 - DNA, 20 bp, synthetic construct
  source 1..20: mol_type = other DNA
tctgggaatgatgaccctga

SEQ ID NO: 286676 - DNA, 20 bp, synthetic construct
  source 1..20: mol_type = other DNA
ctctgggaatgatgaccctg

SEQ ID NO: 286677 - DNA, 20 bp, synthetic construct
  source 1..20: mol_type = other DNA
cctctgggaatgatgaccct

SEQ ID NO: 286678 - DNA, 20 bp, synthetic construct
  source 1..20: mol_type = other DNA
ccctctgggaatgatgaccc

SEQ ID NO: 286679 - DNA, 20 bp, synthetic construct
  source 1..20: mol_type = other DNA
tccctctgggaatgatgacc

SEQ ID NO: 286680 - DNA, 20 bp, synthetic construct
  source 1..20: mol_type = other DNA
ctccctctgggaatgatgac

SEQ ID NO: 286681 - DNA, 20 bp, synthetic construct
  source 1..20: mol_type = other DNA
gctccctctgggaatgatga

SEQ ID NO: 286682 - DNA, 20 bp, synthetic construct
  source 1..20: mol_type = other DNA
cgctccctctgggaatgatg

SEQ ID NO: 286683 - DNA, 20 bp, synthetic construct
  source 1..20: mol_type = other DNA
ccgctccctctgggaatgat

SEQ ID NO: 286684 - DNA, 20 bp, synthetic construct
  source 1..20: mol_type = other DNA
accgctccctctgggaatga

SEQ ID NO: 286685 - DNA, 20 bp, synthetic construct
  source 1..20: mol_type = other DNA
caccgctccctctgggaatg

SEQ ID NO: 286686 - DNA, 20 bp, synthetic construct
  source 1..20: mol_type = other DNA
gcaccgctccctctgggaat

SEQ ID NO: 286687 - DNA, 20 bp, synthetic construct
  source 1..20: mol_type = other DNA
ggcaccgctccctctgggaa

SEQ ID NO: 286688 - DNA, 20 bp, synthetic construct
  source 1..20: mol_type = other DNA
gggcaccgctccctctggga

SEQ ID NO: 286689 - DNA, 20 bp, synthetic construct
  source 1..20: mol_type = other DNA
agggcaccgctccctctggg

SEQ ID NO: 286690 - DNA, 20 bp, synthetic construct
  source 1..20: mol_type = other DNA
cagggcaccgctccctctgg

SEQ ID NO: 286691 - DNA, 20 bp, synthetic construct
  source 1..20: mol_type = other DNA
ccagggcaccgctccctctg

SEQ ID NO: 286692 - DNA, 20 bp, synthetic construct
  source 1..20: mol_type = other DNA
tccagggcaccgctccctct

SEQ ID NO: 286693 - DNA, 20 bp, synthetic construct
  source 1..20: mol_type = other DNA
ctccagggcaccgctccctc

SEQ ID NO: 286694 - DNA, 20 bp, synthetic construct
  source 1..20: mol_type = other DNA
cctccagggcaccgctccct

SEQ ID NO: 286695 - DNA, 20 bp, synthetic construct
  source 1..20: mol_type = other DNA
gcctccagggcaccgctccc

SEQ ID NO: 286696 - DNA, 20 bp, synthetic construct
  source 1..20: mol_type = other DNA
ggcctccagggcaccgctcc

SEQ ID NO: 286697 - DNA, 20 bp, synthetic construct
  source 1..20: mol_type = other DNA
tggcctccagggcaccgctc

SEQ ID NO: 286698 - DNA, 20 bp, synthetic construct
  source 1..20: mol_type = other DNA
gtggcctccagggcaccgct

SEQ ID NO: 286699 - DNA, 20 bp, synthetic construct
  source 1..20: mol_type = other DNA
tgtggcctccagggcaccgc

SEQ ID NO: 286700 - DNA, 20 bp, synthetic construct
  source 1..20: mol_type = other DNA
ctgtggcctccagggcaccg

SEQ ID NO: 286701 - DNA, 20 bp, synthetic construct
  source 1..20: mol_type = other DNA
cctgtggcctccagggcacc

SEQ ID NO: 286702 - DNA, 20 bp, synthetic construct
  source 1..20: mol_type = other DNA
gcctgtggcctccagggcac

SEQ ID NO: 286703 - DNA, 20 bp, synthetic construct
  source 1..20: mol_type = other DNA
ggcctgtggcctccagggca

SEQ ID NO: 286704 - DNA, 20 bp, synthetic construct
  source 1..20: mol_type = other DNA
aggcctgtggcctccagggc

SEQ ID NO: 286705 - DNA, 20 bp, synthetic construct
  source 1..20: mol_type = other DNA
gaggcctgtggcctccaggg

SEQ ID NO: 286706 - DNA, 20 bp, synthetic construct
  source 1..20: mol_type = other DNA
ggaggcctgtggcctccagg

SEQ ID NO: 286707 - DNA, 20 bp, synthetic construct
  source 1..20: mol_type = other DNA
aggaggcctgtggcctccag

SEQ ID NO: 286708 - DNA, 20 bp, synthetic construct
  source 1..20: mol_type = other DNA
gaggaggcctgtggcctcca

SEQ ID NO: 286709 - DNA, 20 bp, synthetic construct
  source 1..20: mol_type = other DNA
tgaggaggcctgtggcctcc

SEQ ID NO: 286710 - DNA, 20 bp, synthetic construct
  source 1..20: mol_type = other DNA
atgaggaggcctgtggcctc

SEQ ID NO: 286711 - DNA, 20 bp, synthetic construct
  source 1..20: mol_type = other DNA
catgaggaggcctgtggcct

SEQ ID NO: 286712 - DNA, 20 bp, synthetic construct
  source 1..20: mol_type = other DNA
acatgaggaggcctgtggcc

SEQ ID NO: 286713 - DNA, 20 bp, synthetic construct
  source 1..20: mol_type = other DNA
cacatgaggaggcctgtggc

SEQ ID NO: 286714 - DNA, 20 bp, synthetic construct
  source 1..20: mol_type = other DNA
acacatgaggaggcctgtgg

SEQ ID NO: 286715 - DNA, 20 bp, synthetic construct
  source 1..20: mol_type = other DNA
cacacatgaggaggcctgtg

SEQ ID NO: 286716 - DNA, 20 bp, synthetic construct
  source 1..20: mol_type = other DNA
acacacatgaggaggcctgt

SEQ ID NO: 286717 - DNA, 20 bp, synthetic construct
  source 1..20: mol_type = other DNA
gacacacatgaggaggcctg

SEQ ID NO: 286718 - DNA, 20 bp, synthetic construct
  source 1..20: mol_type = other DNA
agacacacatgaggaggcct

SEQ ID NO: 286719 - DNA, 20 bp, synthetic construct
  source 1..20: mol_type = other DNA
cagacacacatgaggaggcc

SEQ ID NO: 286720 - DNA, 20 bp, synthetic construct
  source 1..20: mol_type = other DNA
gcagacacacatgaggaggc

SEQ ID NO: 286721 - DNA, 20 bp, synthetic construct
  source 1..20: mol_type = other DNA
cgcagacacacatgaggagg

SEQ ID NO: 286722 - DNA, 20 bp, synthetic construct
  source 1..20: mol_type = other DNA
acgcagacacacatgaggag

SEQ ID NO: 286723 - DNA, 20 bp, synthetic construct
  source 1..20: mol_type = other DNA
gacgcagacacacatgagga

SEQ ID NO: 286724 - DNA, 20 bp, synthetic construct
  source 1..20: mol_type = other DNA
ggacgcagacacacatgagg

SEQ ID NO: 286725 - DNA, 20 bp, synthetic construct
  source 1..20: mol_type = other DNA
cggacgcagacacacatgag

SEQ ID NO: 286726 - DNA, 20 bp, synthetic construct
  source 1..20: mol_type = other DNA
gcggacgcagacacacatga

SEQ ID NO: 286727 - DNA, 20 bp, synthetic construct
  source 1..20: mol_type = other DNA
agcggacgcagacacacatg

SEQ ID NO: 286728 - DNA, 20 bp, synthetic construct
  source 1..20: mol_type = other DNA
gagcggacgcagacacacat

SEQ ID NO: 286729 - DNA, 20 bp, synthetic construct
  source 1..20: mol_type = other DNA
cgagcggacgcagacacaca

SEQ ID NO: 286730 - DNA, 20 bp, synthetic construct
  source 1..20: mol_type = other DNA
tcgagcggacgcagacacac

SEQ ID NO: 286731 - DNA, 20 bp, synthetic construct
  source 1..20: mol_type = other DNA
ctcgagcggacgcagacaca

SEQ ID NO: 286732 - DNA, 20 bp, synthetic construct
  source 1..20: mol_type = other DNA
gctcgagcggacgcagacac

SEQ ID NO: 286733 - DNA, 20 bp, synthetic construct
  source 1..20: mol_type = other DNA
agctcgagcggacgcagaca

SEQ ID NO: 286734 - DNA, 20 bp, synthetic construct
  source 1..20: mol_type = other DNA
aagctcgagcggacgcagac

SEQ ID NO: 286735 - DNA, 20 bp, synthetic construct
  source 1..20: mol_type = other DNA
taagctcgagcggacgcaga

SEQ ID NO: 286736 - DNA, 20 bp, synthetic construct
  source 1..20: mol_type = other DNA
gtaagctcgagcggacgcag

SEQ ID NO: 286737 - DNA, 20 bp, synthetic construct
  source 1..20: mol_type = other DNA
agtaagctcgagcggacgca

SEQ ID NO: 286738 - DNA, 20 bp, synthetic construct
  source 1..20: mol_type = other DNA
cagtaagctcgagcggacgc

SEQ ID NO: 286739 - DNA, 20 bp, synthetic construct
  source 1..20: mol_type = other DNA
tcagtaagctcgagcggacg

SEQ ID NO: 286740 - DNA, 20 bp, synthetic construct
  source 1..20: mol_type = other DNA
ctcagtaagctcgagcggac

SEQ ID NO: 286741 - DNA, 20 bp, synthetic construct
  source 1..20: mol_type = other DNA
tctcagtaagctcgagcgga

SEQ ID NO: 286742 - DNA, 20 bp, synthetic construct
  source 1..20: mol_type = other DNA
gtctcagtaagctcgagcgg

SEQ ID NO: 286743 - DNA, 20 bp, synthetic construct
  source 1..20: mol_type = other DNA
tgtctcagtaagctcgagcg

SEQ ID NO: 286744 - DNA, 20 bp, synthetic construct
  source 1..20: mol_type = other DNA
gtgtctcagtaagctcgagc

SEQ ID NO: 286745 - DNA, 20 bp, synthetic construct
  source 1..20: mol_type = other DNA
agtgtctcagtaagctcgag

SEQ ID NO: 286746 - DNA, 20 bp, synthetic construct
  source 1..20: mol_type = other DNA
tagtgtctcagtaagctcga

SEQ ID NO: 286747 - DNA, 20 bp, synthetic construct
  source 1..20: mol_type = other DNA
ttagtgtctcagtaagctcg

SEQ ID NO: 286748 - DNA, 20 bp, synthetic construct
  source 1..20: mol_type = other DNA
tttagtgtctcagtaagctc

SEQ ID NO: 286749 - DNA, 20 bp, synthetic construct
  source 1..20: mol_type = other DNA
atttagtgtctcagtaagct

SEQ ID NO: 286750 - DNA, 20 bp, synthetic construct
  source 1..20: mol_type = other DNA
gatttagtgtctcagtaagc

SEQ ID NO: 286751 - DNA, 20 bp, synthetic construct
  source 1..20: mol_type = other DNA
agatttagtgtctcagtaag

SEQ ID NO: 286752 - DNA, 20 bp, synthetic construct
  source 1..20: mol_type = other DNA
cagatttagtgtctcagtaa

SEQ ID NO: 286753 - DNA, 20 bp, synthetic construct
  source 1..20: mol_type = other DNA
acagatttagtgtctcagta

SEQ ID NO: 286754 - DNA, 20 bp, synthetic construct
  source 1..20: mol_type = other DNA
aacagatttagtgtctcagt

SEQ ID NO: 286755 - DNA, 20 bp, synthetic construct
  source 1..20: mol_type = other DNA
caacagatttagtgtctcag

SEQ ID NO: 286756 - DNA, 20 bp, synthetic construct
  source 1..20: mol_type = other DNA
ccaacagatttagtgtctca

SEQ ID NO: 286757 - DNA, 20 bp, synthetic construct
  source 1..20: mol_type = other DNA
accaacagatttagtgtctc

SEQ ID NO: 286758 - DNA, 20 bp, synthetic construct
  source 1..20: mol_type = other DNA
aaccaacagatttagtgtct

SEQ ID NO: 286759 - DNA, 20 bp, synthetic construct
  source 1..20: mol_type = other DNA
aaaccaacagatttagtgtc

SEQ ID NO: 286760 - DNA, 20 bp, synthetic construct
  source 1..20: mol_type = other DNA
gaaaccaacagatttagtgt

SEQ ID NO: 286761 - DNA, 20 bp, synthetic construct
  source 1..20: mol_type = other DNA
agaaaccaacagatttagtg

SEQ ID NO: 286762 - DNA, 20 bp, synthetic construct
  source 1..20: mol_type = other DNA
cagaaaccaacagatttagt

SEQ ID NO: 286763 - DNA, 20 bp, synthetic construct
  source 1..20: mol_type = other DNA
gcagaaaccaacagatttag

SEQ ID NO: 286764 - DNA, 20 bp, synthetic construct
  source 1..20: mol_type = other DNA
agcagaaaccaacagattta

SEQ ID NO: 286765 - DNA, 20 bp, synthetic construct
  source 1..20: mol_type = other DNA
cagcagaaaccaacagattt

SEQ ID NO: 286766 - DNA, 20 bp, synthetic construct
  source 1..20: mol_type = other DNA
acagcagaaaccaacagatt

SEQ ID NO: 286767 - DNA, 20 bp, synthetic construct
  source 1..20: mol_type = other DNA
cacagcagaaaccaacagat

SEQ ID NO: 286768 - DNA, 20 bp, synthetic construct
  source 1..20: mol_type = other DNA
gcacagcagaaaccaacaga

SEQ ID NO: 286769 - DNA, 20 bp, synthetic construct
  source 1..20: mol_type = other DNA
ggcacagcagaaaccaacag

SEQ ID NO: 286770 - DNA, 20 bp, synthetic construct
  source 1..20: mol_type = other DNA
tggcacagcagaaaccaaca

SEQ ID NO: 286771 - DNA, 20 bp, synthetic construct
  source 1..20: mol_type = other DNA
gtggcacagcagaaaccaac

SEQ ID NO: 286772 - DNA, 20 bp, synthetic construct
  source 1..20: mol_type = other DNA
ggtggcacagcagaaaccaa

SEQ ID NO: 286773 - DNA, 20 bp, synthetic construct
  source 1..20: mol_type = other DNA
aggtggcacagcagaaacca

SEQ ID NO: 286774 - DNA, 20 bp, synthetic construct
  source 1..20: mol_type = other DNA
taggtggcacagcagaaacc

SEQ ID NO: 286775 - DNA, 20 bp, synthetic construct
  source 1..20: mol_type = other DNA
gtaggtggcacagcagaaac

SEQ ID NO: 286776 - DNA, 20 bp, synthetic construct
  source 1..20: mol_type = other DNA
ggtaggtggcacagcagaaa

SEQ ID NO: 286777 - DNA, 20 bp, synthetic construct
  source 1..20: mol_type = other DNA
gggtaggtggcacagcagaa

SEQ ID NO: 286778 - DNA, 20 bp, synthetic construct
  source 1..20: mol_type = other DNA
tgggtaggtggcacagcaga

SEQ ID NO: 286779 - DNA, 20 bp, synthetic construct
  source 1..20: mol_type = other DNA
gtgggtaggtggcacagcag

SEQ ID NO: 286780 - DNA, 20 bp, synthetic construct
  source 1..20: mol_type = other DNA
ggtgggtaggtggcacagca

SEQ ID NO: 286781 - DNA, 20 bp, synthetic construct
  source 1..20: mol_type = other DNA
gggtgggtaggtggcacagc

SEQ ID NO: 286782 - DNA, 20 bp, synthetic construct
  source 1..20: mol_type = other DNA
agggtgggtaggtggcacag

SEQ ID NO: 286783 - DNA, 20 bp, synthetic construct
  source 1..20: mol_type = other DNA
cagggtgggtaggtggcaca

SEQ ID NO: 286784 - DNA, 20 bp, synthetic construct
  source 1..20: mol_type = other DNA
acagggtgggtaggtggcac

SEQ ID NO: 286785 - DNA, 20 bp, synthetic construct
  source 1..20: mol_type = other DNA
aacagggtgggtaggtggca

SEQ ID NO: 286786 - DNA, 20 bp, synthetic construct
  source 1..20: mol_type = other DNA
caacagggtgggtaggtggc

SEQ ID NO: 286787 - DNA, 20 bp, synthetic construct
  source 1..20: mol_type = other DNA
ccaacagggtgggtaggtgg

SEQ ID NO: 286788 - DNA, 20 bp, synthetic construct
  source 1..20: mol_type = other DNA
accaacagggtgggtaggtg

SEQ ID NO: 286789 - DNA, 20 bp, synthetic construct
  source 1..20: mol_type = other DNA
caccaacagggtgggtaggt

SEQ ID NO: 286790 - DNA, 20 bp, synthetic construct
  source 1..20: mol_type = other DNA
acaccaacagggtgggtagg

SEQ ID NO: 286791 - DNA, 20 bp, synthetic construct
  source 1..20: mol_type = other DNA
aacaccaacagggtgggtag

SEQ ID NO: 286792 - DNA, 20 bp, synthetic construct
  source 1..20: mol_type = other DNA
caacaccaacagggtgggta

SEQ ID NO: 286793 - DNA, 20 bp, synthetic construct
  source 1..20: mol_type = other DNA
gcaacaccaacagggtgggt

SEQ ID NO: 286794 - DNA, 20 bp, synthetic construct
  source 1..20: mol_type = other DNA
agcaacaccaacagggtggg

SEQ ID NO: 286795 - DNA, 20 bp, synthetic construct
  source 1..20: mol_type = other DNA
aagcaacaccaacagggtgg

SEQ ID NO: 286796 - DNA, 20 bp, synthetic construct
  source 1..20: mol_type = other DNA
aaagcaacaccaacagggtg

SEQ ID NO: 286797 - DNA, 20 bp, synthetic construct
  source 1..20: mol_type = other DNA
caaagcaacaccaacagggt

SEQ ID NO: 286798 - DNA, 20 bp, synthetic construct
  source 1..20: mol_type = other DNA
acaaagcaacaccaacaggg

SEQ ID NO: 286799 - DNA, 20 bp, synthetic construct
  source 1..20: mol_type = other DNA
aacaaagcaacaccaacagg

SEQ ID NO: 286800 - DNA, 20 bp, synthetic construct
  source 1..20: mol_type = other DNA
gaacaaagcaacaccaacag

SEQ ID NO: 286801 - DNA, 20 bp, synthetic construct
  source 1..20: mol_type = other DNA
ggaacaaagcaacaccaaca

SEQ ID NO: 286802 - DNA, 20 bp, synthetic construct
  source 1..20: mol_type = other DNA
aggaacaaagcaacaccaac

SEQ ID NO: 286803 - DNA, 20 bp, synthetic construct
  source 1..20: mol_type = other DNA
taggaacaaagcaacaccaa

SEQ ID NO: 286804 - DNA, 20 bp, synthetic construct
  source 1..20: mol_type = other DNA
ataggaacaaagcaacacca

SEQ ID NO: 286805 - DNA, 20 bp, synthetic construct
  source 1..20: mol_type = other DNA
aataggaacaaagcaacacc

SEQ ID NO: 286806 - DNA, 20 bp, synthetic construct
  source 1..20: mol_type = other DNA
caataggaacaaagcaacac

SEQ ID NO: 286807 - DNA, 20 bp, synthetic construct
  source 1..20: mol_type = other DNA
gcaataggaacaaagcaaca

SEQ ID NO: 286808 - DNA, 20 bp, synthetic construct
  source 1..20: mol_type = other DNA
agcaataggaacaaagcaac

SEQ ID NO: 286809 - DNA, 20 bp, synthetic construct
  source 1..20: mol_type = other DNA
tagcaataggaacaaagcaa

SEQ ID NO: 286810 - DNA, 20 bp, synthetic construct
  source 1..20: mol_type = other DNA
ttagcaataggaacaaagca

SEQ ID NO: 286811 - DNA, 20 bp, synthetic construct
  source 1..20: mol_type = other DNA
tttagcaataggaacaaagc

SEQ ID NO: 286812 - DNA, 20 bp, synthetic construct
  source 1..20: mol_type = other DNA
ctttagcaataggaacaaag

SEQ ID NO: 286813 - DNA, 20 bp, synthetic construct
  source 1..20: mol_type = other DNA
tctttagcaataggaacaaa

SEQ ID NO: 286814 - DNA, 20 bp, synthetic construct
  source 1..20: mol_type = other DNA
gtctttagcaataggaacaa

SEQ ID NO: 286815 - DNA, 20 bp, synthetic construct
  source 1..20: mol_type = other DNA
tgtctttagcaataggaaca

SEQ ID NO: 286816 - DNA, 20 bp, synthetic construct
  source 1..20: mol_type = other DNA
ctgtctttagcaataggaac

SEQ ID NO: 286817 - DNA, 20 bp, synthetic construct
  source 1..20: mol_type = other DNA
cctgtctttagcaataggaa

SEQ ID NO: 286818 - DNA, 20 bp, synthetic construct
  source 1..20: mol_type = other DNA
tcctgtctttagcaatagga

SEQ ID NO: 286819 - DNA, 20 bp, synthetic construct
  source 1..20: mol_type = other DNA
ttcctgtctttagcaatagg

SEQ ID NO: 286820 - DNA, 20 bp, synthetic construct
  source 1..20: mol_type = other DNA
attcctgtctttagcaatag

SEQ ID NO: 286821 - DNA, 20 bp, synthetic construct
  source 1..20: mol_type = other DNA
cattcctgtctttagcaata

SEQ ID NO: 286822 - DNA, 20 bp, synthetic construct
  source 1..20: mol_type = other DNA
acattcctgtctttagcaat

SEQ ID NO: 286823 - DNA, 20 bp, synthetic construct
  source 1..20: mol_type = other DNA
gacattcctgtctttagcaa

SEQ ID NO: 286824 - DNA, 20 bp, synthetic construct
  source 1..20: mol_type = other DNA
ggacattcctgtctttagca

SEQ ID NO: 286825 - DNA, 20 bp, synthetic construct
  source 1..20: mol_type = other DNA
tggacattcctgtctttagc

SEQ ID NO: 286826 - DNA, 20 bp, synthetic construct
  source 1..20: mol_type = other DNA
ctggacattcctgtctttag

SEQ ID NO: 286827 - DNA, 20 bp, synthetic construct
  source 1..20: mol_type = other DNA
cctggacattcctgtcttta

SEQ ID NO: 286828 - DNA, 20 bp, synthetic construct
  source 1..20: mol_type = other DNA
tcctggacattcctgtcttt

SEQ ID NO: 286829 - DNA, 20 bp, synthetic construct
  source 1..20: mol_type = other DNA
gtcctggacattcctgtctt

SEQ ID NO: 286830 - DNA, 20 bp, synthetic construct
  source 1..20: mol_type = other DNA
tgtcctggacattcctgtct

SEQ ID NO: 286831 - DNA, 20 bp, synthetic construct
  source 1..20: mol_type = other DNA
gtgtcctggacattcctgtc

SEQ ID NO: 286832 - DNA, 20 bp, synthetic construct
  source 1..20: mol_type = other DNA
agtgtcctggacattcctgt

SEQ ID NO: 286833 - DNA, 20 bp, synthetic construct
  source 1..20: mol_type = other DNA
cagtgtcctggacattcctg

SEQ ID NO: 286834 - DNA, 20 bp, synthetic construct
  source 1..20: mol_type = other DNA
tcagtgtcctggacattcct

SEQ ID NO: 286835 - DNA, 20 bp, synthetic construct
  source 1..20: mol_type = other DNA
ctcagtgtcctggacattcc

SEQ ID NO: 286836 - DNA, 20 bp, synthetic construct
  source 1..20: mol_type = other DNA
actcagtgtcctggacattc

SEQ ID NO: 286837 - DNA, 20 bp, synthetic construct
  source 1..20: mol_type = other DNA
cactcagtgtcctggacatt

SEQ ID NO: 286838 - DNA, 20 bp, synthetic construct
  source 1..20: mol_type = other DNA
acactcagtgtcctggacat

SEQ ID NO: 286839 - DNA, 20 bp, synthetic construct
  source 1..20: mol_type = other DNA
cacactcagtgtcctggaca

SEQ ID NO: 286840 - DNA, 20 bp, synthetic construct
  source 1..20: mol_type = other DNA
gcacactcagtgtcctggac

SEQ ID NO: 286841 - DNA, 20 bp, synthetic construct
  source 1..20: mol_type = other DNA
tgcacactcagtgtcctgga

SEQ ID NO: 286842 - DNA, 20 bp, synthetic construct
  source 1..20: mol_type = other DNA
ctgcacactcagtgtcctgg

SEQ ID NO: 286843 - DNA, 20 bp, synthetic construct
  source 1..20: mol_type = other DNA
cctgcacactcagtgtcctg

SEQ ID NO: 286844 - DNA, 20 bp, synthetic construct
  source 1..20: mol_type = other DNA
acctgcacactcagtgtcct

SEQ ID NO: 286845 - DNA, 20 bp, synthetic construct
  source 1..20: mol_type = other DNA
cacctgcacactcagtgtcc

SEQ ID NO: 286846 - DNA, 20 bp, synthetic construct
  source 1..20: mol_type = other DNA
gcacctgcacactcagtgtc

SEQ ID NO: 286847 - DNA, 20 bp, synthetic construct
  source 1..20: mol_type = other DNA
ggcacctgcacactcagtgt

SEQ ID NO: 286848 - DNA, 20 bp, synthetic construct
  source 1..20: mol_type = other DNA
aggcacctgcacactcagtg

SEQ ID NO: 286849 - DNA, 20 bp, synthetic construct
  source 1..20: mol_type = other DNA
caggcacctgcacactcagt

SEQ ID NO: 286850 - DNA, 20 bp, synthetic construct
  source 1..20: mol_type = other DNA
gcaggcacctgcacactcag

SEQ ID NO: 286851 - DNA, 20 bp, synthetic construct
  source 1..20: mol_type = other DNA
agcaggcacctgcacactca

SEQ ID NO: 286852 - DNA, 20 bp, synthetic construct
  source 1..20: mol_type = other DNA
cagcaggcacctgcacactc

SEQ ID NO: 286853 - DNA, 20 bp, synthetic construct
  source 1..20: mol_type = other DNA
ccagcaggcacctgcacact

SEQ ID NO: 286854 - DNA, 20 bp, synthetic construct
  source 1..20: mol_type = other DNA
accagcaggcacctgcacac

SEQ ID NO: 286855 - DNA, 20 bp, synthetic construct
  source 1..20: mol_type = other DNA
aaccagcaggcacctgcaca

SEQ ID NO: 286856 - DNA, 20 bp, synthetic construct
  source 1..20: mol_type = other DNA
gaaccagcaggcacctgcac

SEQ ID NO: 286857 - DNA, 20 bp, synthetic construct
  source 1..20: mol_type = other DNA
agaaccagcaggcacctgca

SEQ ID NO: 286858 - DNA, 20 bp, synthetic construct
  source 1..20: mol_type = other DNA
gagaaccagcaggcacctgc

SEQ ID NO: 286859 - DNA, 20 bp, synthetic construct
  source 1..20: mol_type = other DNA
tgagaaccagcaggcacctg

SEQ ID NO: 286860 - DNA, 20 bp, synthetic construct
  source 1..20: mol_type = other DNA
gtgagaaccagcaggcacct

SEQ ID NO: 286861 - DNA, 20 bp, synthetic construct
  source 1..20: mol_type = other DNA
cgtgagaaccagcaggcacc

SEQ ID NO: 286862 - DNA, 20 bp, synthetic construct
  source 1..20: mol_type = other DNA
acgtgagaaccagcaggcac

SEQ ID NO: 286863 - DNA, 20 bp, synthetic construct
  source 1..20: mol_type = other DNA
gacgtgagaaccagcaggca

SEQ ID NO: 286864 - DNA, 20 bp, synthetic construct
  source 1..20: mol_type = other DNA
ggacgtgagaaccagcaggc

SEQ ID NO: 286865 - DNA, 20 bp, synthetic construct
  source 1..20: mol_type = other DNA
cggacgtgagaaccagcagg

SEQ ID NO: 286866 - DNA, 20 bp, synthetic construct
  source 1..20: mol_type = other DNA
tcggacgtgagaaccagcag

SEQ ID NO: 286867 - DNA, 20 bp, synthetic construct
  source 1..20: mol_type = other DNA
ctcggacgtgagaaccagca

SEQ ID NO: 286868 - DNA, 20 bp, synthetic construct
  source 1..20: mol_type = other DNA
gctcggacgtgagaaccagc

SEQ ID NO: 286869 - DNA, 20 bp, synthetic construct
  source 1..20: mol_type = other DNA
agctcggacgtgagaaccag

SEQ ID NO: 286870 - DNA, 20 bp, synthetic construct
  source 1..20: mol_type = other DNA
cagctcggacgtgagaacca

SEQ ID NO: 286871 - DNA, 20 bp, synthetic construct
  source 1..20: mol_type = other DNA
gcagctcggacgtgagaacc

SEQ ID NO: 286872 - DNA, 20 bp, synthetic construct
  source 1..20: mol_type = other DNA
agcagctcggacgtgagaac

SEQ ID NO: 286873 - DNA, 20 bp, synthetic construct
  source 1..20: mol_type = other DNA
cagcagctcggacgtgagaa

SEQ ID NO: 286874 - DNA, 20 bp, synthetic construct
  source 1..20: mol_type = other DNA
tcagcagctcggacgtgaga

SEQ ID NO: 286875 - DNA, 20 bp, synthetic construct
  source 1..20: mol_type = other DNA
ttcagcagctcggacgtgag

SEQ ID NO: 286876 - DNA, 20 bp, synthetic construct
  source 1..20: mol_type = other DNA
gttcagcagctcggacgtga

SEQ ID NO: 286877 - DNA, 20 bp, synthetic construct
  source 1..20: mol_type = other DNA
agttcagcagctcggacgtg

SEQ ID NO: 286878 - DNA, 20 bp, synthetic construct
  source 1..20: mol_type = other DNA
gagttcagcagctcggacgt

SEQ ID NO: 286879 - DNA, 20 bp, synthetic construct
  source 1..20: mol_type = other DNA
ggagttcagcagctcggacg

SEQ ID NO: 286880 - DNA, 20 bp, synthetic construct
  source 1..20: mol_type = other DNA
cggagttcagcagctcggac

SEQ ID NO: 286881 - DNA, 20 bp, synthetic construct
  source 1..20: mol_type = other DNA
gcggagttcagcagctcgga

SEQ ID NO: 286882 - DNA, 20 bp, synthetic construct
  source 1..20: mol_type = other DNA
agcggagttcagcagctcgg

SEQ ID NO: 286883 - DNA, 20 bp, synthetic construct
  source 1..20: mol_type = other DNA
cagcggagttcagcagctcg

SEQ ID NO: 286884 - DNA, 20 bp, synthetic construct
  source 1..20: mol_type = other DNA
ccagcggagttcagcagctc

SEQ ID NO: 286885 - DNA, 20 bp, synthetic construct
  source 1..20: mol_type = other DNA
cccagcggagttcagcagct

SEQ ID NO: 286886 - DNA, 20 bp, synthetic construct
  source 1..20: mol_type = other DNA
acccagcggagttcagcagc

SEQ ID NO: 286887 - DNA, 20 bp, synthetic construct
  source 1..20: mol_type = other DNA
gacccagcggagttcagcag

SEQ ID NO: 286888 - DNA, 20 bp, synthetic construct
  source 1..20: mol_type = other DNA
ggacccagcggagttcagca

SEQ ID NO: 286889 - DNA, 20 bp, synthetic construct
  source 1..20: mol_type = other DNA
aggacccagcggagttcagc

SEQ ID NO: 286890 - DNA, 20 bp, synthetic construct
  source 1..20: mol_type = other DNA
caggacccagcggagttcag

SEQ ID NO: 286891 - DNA, 20 bp, synthetic construct
  source 1..20: mol_type = other DNA
gcaggacccagcggagttca

SEQ ID NO: 286892 - DNA, 20 bp, synthetic construct
  source 1..20: mol_type = other DNA
agcaggacccagcggagttc

SEQ ID NO: 286893 - DNA, 20 bp, synthetic construct
  source 1..20: mol_type = other DNA
aagcaggacccagcggagtt

SEQ ID NO: 286894 - DNA, 20 bp, synthetic construct
  source 1..20: mol_type = other DNA
taagcaggacccagcggagt

SEQ ID NO: 286895 - DNA, 20 bp, synthetic construct
  source 1..20: mol_type = other DNA
gtaagcaggacccagcggag

SEQ ID NO: 286896 - DNA, 20 bp, synthetic construct
  source 1..20: mol_type = other DNA
agtaagcaggacccagcgga

SEQ ID NO: 286897 - DNA, 20 bp, synthetic construct
  source 1..20: mol_type = other DNA
cagtaagcaggacccagcgg

SEQ ID NO: 286898 - DNA, 20 bp, synthetic construct
  source 1..20: mol_type = other DNA
tcagtaagcaggacccagcg

SEQ ID NO: 286899 - DNA, 20 bp, synthetic construct
  source 1..20: mol_type = other DNA
atcagtaagcaggacccagc

SEQ ID NO: 286900 - DNA, 20 bp, synthetic construct
  source 1..20: mol_type = other DNA
catcagtaagcaggacccag

SEQ ID NO: 286901 - DNA, 20 bp, synthetic construct
  source 1..20: mol_type = other DNA
ccatcagtaagcaggaccca

SEQ ID NO: 286902 - DNA, 20 bp, synthetic construct
  source 1..20: mol_type = other DNA
accatcagtaagcaggaccc

SEQ ID NO: 286903 - DNA, 20 bp, synthetic construct
  source 1..20: mol_type = other DNA
gaccatcagtaagcaggacc

SEQ ID NO: 286904 - DNA, 20 bp, synthetic construct
  source 1..20: mol_type = other DNA
agaccatcagtaagcaggac

SEQ ID NO: 286905 - DNA, 20 bp, synthetic construct
  source 1..20: mol_type = other DNA
aagaccatcagtaagcagga

SEQ ID NO: 286906 - DNA, 20 bp, synthetic construct
  source 1..20: mol_type = other DNA
aaagaccatcagtaagcagg

SEQ ID NO: 286907 - DNA, 20 bp, synthetic construct
  source 1..20: mol_type = other DNA
caaagaccatcagtaagcag

SEQ ID NO: 286908 - DNA, 20 bp, synthetic construct
  source 1..20: mol_type = other DNA
gcaaagaccatcagtaagca

SEQ ID NO: 286909 - DNA, 20 bp, synthetic construct
  source 1..20: mol_type = other DNA
agcaaagaccatcagtaagc

SEQ ID NO: 286910 - DNA, 20 bp, synthetic construct
  source 1..20: mol_type = other DNA
gagcaaagaccatcagtaag

SEQ ID NO: 286911 - DNA, 20 bp, synthetic construct
  source 1..20: mol_type = other DNA
agagcaaagaccatcagtaa

SEQ ID NO: 286912 - DNA, 20 bp, synthetic construct
  source 1..20: mol_type = other DNA
tagagcaaagaccatcagta

SEQ ID NO: 286913 - DNA, 20 bp, synthetic construct
  source 1..20: mol_type = other DNA
ctagagcaaagaccatcagt

SEQ ID NO: 286914 - DNA, 20 bp, synthetic construct
  source 1..20: mol_type = other DNA
actagagcaaagaccatcag

SEQ ID NO: 286915 - DNA, 20 bp, synthetic construct
  source 1..20: mol_type = other DNA
cactagagcaaagaccatca

SEQ ID NO: 286916 - DNA, 20 bp, synthetic construct
  source 1..20: mol_type = other DNA
gcactagagcaaagaccatc

SEQ ID NO: 286917 - DNA, 20 bp, synthetic construct
  source 1..20: mol_type = other DNA
agcactagagcaaagaccat

SEQ ID NO: 286918 - DNA, 20 bp, synthetic construct
  source 1..20: mol_type = other DNA
aagcactagagcaaagacca

SEQ ID NO: 286919 - DNA, 20 bp, synthetic construct
  source 1..20: mol_type = other DNA
aaagcactagagcaaagacc

SEQ ID NO: 286920 - DNA, 20 bp, synthetic construct
  source 1..20: mol_type = other DNA
gaaagcactagagcaaagac

SEQ ID NO: 286921 - DNA, 20 bp, synthetic construct
  source 1..20: mol_type = other DNA
ggaaagcactagagcaaaga

SEQ ID NO: 286922 - DNA, 20 bp, synthetic construct
  source 1..20: mol_type = other DNA
tggaaagcactagagcaaag

SEQ ID NO: 286923 - DNA, 20 bp, synthetic construct
  source 1..20: mol_type = other DNA
ctggaaagcactagagcaaa

SEQ ID NO: 286924 - DNA, 20 bp, synthetic construct
  source 1..20: mol_type = other DNA
cctggaaagcactagagcaa

SEQ ID NO: 286925 - DNA, 20 bp, synthetic construct
  source 1..20: mol_type = other DNA
ccctggaaagcactagagca

SEQ ID NO: 286926 - DNA, 20 bp, synthetic construct
  source 1..20: mol_type = other DNA
accctggaaagcactagagc

SEQ ID NO: 286927 - DNA, 20 bp, synthetic construct
  source 1..20: mol_type = other DNA
gaccctggaaagcactagag

SEQ ID NO: 286928 - DNA, 20 bp, synthetic construct
  source 1..20: mol_type = other DNA
ggaccctggaaagcactaga

SEQ ID NO: 286929 - DNA, 20 bp, synthetic construct
  source 1..20: mol_type = other DNA
cggaccctggaaagcactag

SEQ ID NO: 286930 - DNA, 20 bp, synthetic construct
  source 1..20: mol_type = other DNA
acggaccctggaaagcacta

SEQ ID NO: 286931 - DNA, 20 bp, synthetic construct
  source 1..20: mol_type = other DNA
cacggaccctggaaagcact

SEQ ID NO: 286932 - DNA, 20 bp, synthetic construct
  source 1..20: mol_type = other DNA
ccacggaccctggaaagcac

SEQ ID NO: 286933 - DNA, 20 bp, synthetic construct
  source 1..20: mol_type = other DNA
tccacggaccctggaaagca

SEQ ID NO: 286934 - DNA, 20 bp, synthetic construct
  source 1..20: mol_type = other DNA
ttccacggaccctggaaagc

SEQ ID NO: 286935 - DNA, 20 bp, synthetic construct
  source 1..20: mol_type = other DNA
cttccacggaccctggaaag

SEQ ID NO: 286936 - DNA, 20 bp, synthetic construct
  source 1..20: mol_type = other DNA
gcttccacggaccctggaaa

SEQ ID NO: 286937 - DNA, 20 bp, synthetic construct
  source 1..20: mol_type = other DNA
agcttccacggaccctggaa

SEQ ID NO: 286938 - DNA, 20 bp, synthetic construct
  source 1..20: mol_type = other DNA
aagcttccacggaccctgga

SEQ ID NO: 286939 - DNA, 20 bp, synthetic construct
  source 1..20: mol_type = other DNA
aaagcttccacggaccctgg

SEQ ID NO: 286940 - DNA, 20 bp, synthetic construct
  source 1..20: mol_type = other DNA
aaaagcttccacggaccctg

SEQ ID NO: 286941 - DNA, 20 bp, synthetic construct
  source 1..20: mol_type = other DNA
gaaaagcttccacggaccct

SEQ ID NO: 286942 - DNA, 20 bp, synthetic construct
  source 1..20: mol_type = other DNA
ggaaaagcttccacggaccc

SEQ ID NO: 286943 - DNA, 20 bp, synthetic construct
  source 1..20: mol_type = other DNA
aggaaaagcttccacggacc

SEQ ID NO: 286944 - DNA, 20 bp, synthetic construct
  source 1..20: mol_type = other DNA
caggaaaagcttccacggac

SEQ ID NO: 286945 - DNA, 20 bp, synthetic construct
  source 1..20: mol_type = other DNA
ccaggaaaagcttccacgga

SEQ ID NO: 286946 - DNA, 20 bp, synthetic construct
  source 1..20: mol_type = other DNA
tccaggaaaagcttccacgg

SEQ ID NO: 286947 - DNA, 20 bp, synthetic construct
  source 1..20: mol_type = other DNA
ttccaggaaaagcttccacg

SEQ ID NO: 286948 - DNA, 20 bp, synthetic construct
  source 1..20: mol_type = other DNA
attccaggaaaagcttccac

SEQ ID NO: 286949 - DNA, 20 bp, synthetic construct
  source 1..20: mol_type = other DNA
tattccaggaaaagcttcca

SEQ ID NO: 286950 - DNA, 20 bp, synthetic construct
  source 1..20: mol_type = other DNA
ttattccaggaaaagcttcc

SEQ ID NO: 286951 - DNA, 20 bp, synthetic construct
  source 1..20: mol_type = other DNA
tttattccaggaaaagcttc

SEQ ID NO: 286952 - DNA, 20 bp, synthetic construct
  source 1..20: mol_type = other DNA
ctttattccaggaaaagctt

SEQ ID NO: 286953 - DNA, 20 bp, synthetic construct
  source 1..20: mol_type = other DNA
gctttattccaggaaaagct

SEQ ID NO: 286954 - DNA, 20 bp, synthetic construct
  source 1..20: mol_type = other DNA
ggctttattccaggaaaagc

SEQ ID NO: 286955 - DNA, 20 bp, synthetic construct
  source 1..20: mol_type = other DNA
gggctttattccaggaaaag

SEQ ID NO: 286956 - DNA, 20 bp, synthetic construct
  source 1..20: mol_type = other DNA
tgggctttattccaggaaaa

SEQ ID NO: 286957 - DNA, 20 bp, synthetic construct
  source 1..20: mol_type = other DNA
gtgggctttattccaggaaa

SEQ ID NO: 286958 - DNA, 20 bp, synthetic construct
  source 1..20: mol_type = other DNA
cgtgggctttattccaggaa

SEQ ID NO: 286959 - DNA, 20 bp, synthetic construct
  source 1..20: mol_type = other DNA
gcgtgggctttattccagga

SEQ ID NO: 286960 - DNA, 20 bp, synthetic construct
  source 1..20: mol_type = other DNA
tgcgtgggctttattccagg

SEQ ID NO: 286961 - DNA, 20 bp, synthetic construct
  source 1..20: mol_type = other DNA
atgcgtgggctttattccag

SEQ ID NO: 286962 - DNA, 20 bp, synthetic construct
  source 1..20: mol_type = other DNA
gatgcgtgggctttattcca

SEQ ID NO: 286963 - DNA, 20 bp, synthetic construct
  source 1..20: mol_type = other DNA
cgatgcgtgggctttattcc

SEQ ID NO: 286964 - DNA, 20 bp, synthetic construct
  source 1..20: mol_type = other DNA
tcgatgcgtgggctttattc

SEQ ID NO: 286965 - DNA, 20 bp, synthetic construct
  source 1..20: mol_type = other DNA
gtcgatgcgtgggctttatt

SEQ ID NO: 286966 - DNA, 20 bp, synthetic construct
  source 1..20: mol_type = other DNA
ggtcgatgcgtgggctttat

SEQ ID NO: 286967 - DNA, 20 bp, synthetic construct
  source 1..20: mol_type = other DNA
gggtcgatgcgtgggcttta

SEQ ID NO: 286968 - DNA, 20 bp, synthetic construct
  source 1..20: mol_type = other DNA
agggtcgatgcgtgggcttt

SEQ ID NO: 286969 - DNA, 20 bp, synthetic construct
  source 1..20: mol_type = other DNA
gagggtcgatgcgtgggctt

SEQ ID NO: 286970 - DNA, 20 bp, synthetic construct
  source 1..20: mol_type = other DNA
tgagggtcgatgcgtgggct

SEQ ID NO: 286971 - DNA, 20 bp, synthetic construct
  source 1..20: mol_type = other DNA
gtgagggtcgatgcgtgggc

SEQ ID NO: 286972 - DNA, 20 bp, synthetic construct
  source 1..20: mol_type = other DNA
tgtgagggtcgatgcgtggg

SEQ ID NO: 286973 - DNA, 20 bp, synthetic construct
  source 1..20: mol_type = other DNA
ctgtgagggtcgatgcgtgg

SEQ ID NO: 286974 - DNA, 20 bp, synthetic construct
  source 1..20: mol_type = other DNA
gctgtgagggtcgatgcgtg

SEQ ID NO: 286975 - DNA, 20 bp, synthetic construct
  source 1..20: mol_type = other DNA
cgctgtgagggtcgatgcgt

SEQ ID NO: 286976 - DNA, 20 bp, synthetic construct
  source 1..20: mol_type = other DNA
gcgctgtgagggtcgatgcg

SEQ ID NO: 286977 - DNA, 20 bp, synthetic construct
  source 1..20: mol_type = other DNA
ggcgctgtgagggtcgatgc

SEQ ID NO: 286978 - DNA, 20 bp, synthetic construct
  source 1..20: mol_type = other DNA
aggcgctgtgagggtcgatg

SEQ ID NO: 286979 - DNA, 20 bp, synthetic construct
  source 1..20: mol_type = other DNA
gaggcgctgtgagggtcgat

SEQ ID NO: 286980 - DNA, 20 bp, synthetic construct
  source 1..20: mol_type = other DNA
ggaggcgctgtgagggtcga

SEQ ID NO: 286981 - DNA, 20 bp, synthetic construct
  source 1..20: mol_type = other DNA
gggaggcgctgtgagggtcg

SEQ ID NO: 286982 - DNA, 20 bp, synthetic construct
  source 1..20: mol_type = other DNA
ggggaggcgctgtgagggtc

SEQ ID NO: 286983 - DNA, 20 bp, synthetic construct
  source 1..20: mol_type = other DNA
aggggaggcgctgtgagggt

SEQ ID NO: 286984 - DNA, 20 bp, synthetic construct
  source 1..20: mol_type = other DNA
gaggggaggcgctgtgaggg

SEQ ID NO: 286985 - DNA, 20 bp, synthetic construct
  source 1..20: mol_type = other DNA
agaggggaggcgctgtgagg

SEQ ID NO: 286986 - DNA, 20 bp, synthetic construct
  source 1..20: mol_type = other DNA
aagaggggaggcgctgtgag

SEQ ID NO: 286987 - DNA, 20 bp, synthetic construct
  source 1..20: mol_type = other DNA
aaagaggggaggcgctgtga

SEQ ID NO: 286988 - DNA, 20 bp, synthetic construct
  source 1..20: mol_type = other DNA
caaagaggggaggcgctgtg

SEQ ID NO: 286989 - DNA, 20 bp, synthetic construct
  source 1..20: mol_type = other DNA
tcaaagaggggaggcgctgt

SEQ ID NO: 286990 - DNA, 20 bp, synthetic construct
  source 1..20: mol_type = other DNA
ctcaaagaggggaggcgctg

SEQ ID NO: 286991 - DNA, 20 bp, synthetic construct
  source 1..20: mol_type = other DNA
cctcaaagaggggaggcgct

SEQ ID NO: 286992 - DNA, 20 bp, synthetic construct
  source 1..20: mol_type = other DNA
gcctcaaagaggggaggcgc

SEQ ID NO: 286993 - DNA, 20 bp, synthetic construct
  source 1..20: mol_type = other DNA
ggcctcaaagaggggaggcg

SEQ ID NO: 286994 - DNA, 20 bp, synthetic construct
  source 1..20: mol_type = other DNA
gggcctcaaagaggggaggc

SEQ ID NO: 286995 - DNA, 20 bp, synthetic construct
  source 1..20: mol_type = other DNA
tgggcctcaaagaggggagg

SEQ ID NO: 286996 - DNA, 20 bp, synthetic construct
  source 1..20: mol_type = other DNA
ctgggcctcaaagaggggag

SEQ ID NO: 286997 - DNA, 20 bp, synthetic construct
  source 1..20: mol_type = other DNA
gctgggcctcaaagagggga

SEQ ID NO: 286998 - DNA, 20 bp, synthetic construct
  source 1..20: mol_type = other DNA
tgctgggcctcaaagagggg

SEQ ID NO: 286999 - DNA, 20 bp, synthetic construct
  source 1..20: mol_type = other DNA
ctgctgggcctcaaagaggg

SEQ ID NO: 287000 - DNA, 20 bp, synthetic construct
  source 1..20: mol_type = other DNA
tctgctgggcctcaaagagg

SEQ ID NO: 287001 - DNA, 20 bp, synthetic construct
  source 1..20: mol_type = other DNA
atctgctgggcctcaaagag

SEQ ID NO: 287002 - DNA, 20 bp, synthetic construct
  source 1..20: mol_type = other DNA
tatctgctgggcctcaaaga

SEQ ID NO: 287003 - DNA, 20 bp, synthetic construct
  source 1..20: mol_type = other DNA
gtatctgctgggcctcaaag

SEQ ID NO: 287004 - DNA, 20 bp, synthetic construct
  source 1..20: mol_type = other DNA
ggtatctgctgggcctcaaa

SEQ ID NO: 287005 - DNA, 20 bp, synthetic construct
  source 1..20: mol_type = other DNA
gggtatctgctgggcctcaa

SEQ ID NO: 287006 - DNA, 20 bp, synthetic construct
  source 1..20: mol_type = other DNA
ggggtatctgctgggcctca

SEQ ID NO: 287007 - DNA, 20 bp, synthetic construct
  source 1..20: mol_type = other DNA
tggggtatctgctgggcctc

SEQ ID NO: 287008 - DNA, 20 bp, synthetic construct
  source 1..20: mol_type = other DNA
gtggggtatctgctgggcct

SEQ ID NO: 287009 - DNA, 20 bp, synthetic construct
  source 1..20: mol_type = other DNA
agtggggtatctgctgggcc

SEQ ID NO: 287010 - DNA, 20 bp, synthetic construct
  source 1..20: mol_type = other DNA
gagtggggtatctgctgggc

SEQ ID NO: 287011 - DNA, 20 bp, synthetic construct
  source 1..20: mol_type = other DNA
ggagtggggtatctgctggg

SEQ ID NO: 287012 - DNA, 20 bp, synthetic construct
  source 1..20: mol_type = other DNA
aggagtggggtatctgctgg

SEQ ID NO: 287013 - DNA, 20 bp, synthetic construct
  source 1..20: mol_type = other DNA
caggagtggggtatctgctg

SEQ ID NO: 287014 - DNA, 20 bp, synthetic construct
  source 1..20: mol_type = other DNA
gcaggagtggggtatctgct

SEQ ID NO: 287015 - DNA, 20 bp, synthetic construct
  source 1..20: mol_type = other DNA
ggcaggagtggggtatctgc

SEQ ID NO: 287016 - DNA, 20 bp, synthetic construct
  source 1..20: mol_type = other DNA
aggcaggagtggggtatctg

SEQ ID NO: 287017 - DNA, 20 bp, synthetic construct
  source 1..20: mol_type = other DNA
aaggcaggagtggggtatct

SEQ ID NO: 287018 - DNA, 20 bp, synthetic construct
  source 1..20: mol_type = other DNA
aaaggcaggagtggggtatc

SEQ ID NO: 287019 - DNA, 20 bp, synthetic construct
  source 1..20: mol_type = other DNA
gaaaggcaggagtggggtat

SEQ ID NO: 287020 - DNA, 20 bp, synthetic construct
  source 1..20: mol_type = other DNA
ggaaaggcaggagtggggta

SEQ ID NO: 287021 - DNA, 20 bp, synthetic construct
  source 1..20: mol_type = other DNA
tggaaaggcaggagtggggt

SEQ ID NO: 287022 - DNA, 20 bp, synthetic construct
  source 1..20: mol_type = other DNA
ctggaaaggcaggagtgggg

SEQ ID NO: 287023 - DNA, 20 bp, synthetic construct
  source 1..20: mol_type = other DNA
gctggaaaggcaggagtggg

SEQ ID NO: 287024 - DNA, 20 bp, synthetic construct
  source 1..20: mol_type = other DNA
tgctggaaaggcaggagtgg

SEQ ID NO: 287025 - DNA, 20 bp, synthetic construct
  source 1..20: mol_type = other DNA
ttgctggaaaggcaggagtg

SEQ ID NO: 287026 - DNA, 20 bp, synthetic construct
  source 1..20: mol_type = other DNA
cttgctggaaaggcaggagt

SEQ ID NO: 287027 - DNA, 20 bp, synthetic construct
  source 1..20: mol_type = other DNA
tcttgctggaaaggcaggag

SEQ ID NO: 287028 - DNA, 20 bp, synthetic construct
  source 1..20: mol_type = other DNA
atcttgctggaaaggcagga

SEQ ID NO: 287029 - DNA, 20 bp, synthetic construct
  source 1..20: mol_type = other DNA
aatcttgctggaaaggcagg

SEQ ID NO: 287030 - DNA, 20 bp, synthetic construct
  source 1..20: mol_type = other DNA
aaatcttgctggaaaggcag

SEQ ID NO: 287031 - DNA, 20 bp, synthetic construct
  source 1..20: mol_type = other DNA
aaaatcttgctggaaaggca

SEQ ID NO: 287032 - DNA, 20 bp, synthetic construct
  source 1..20: mol_type = other DNA
aaaaatcttgctggaaaggc

SEQ ID NO: 287033 - DNA, 20 bp, synthetic construct
  source 1..20: mol_type = other DNA
gaaaaatcttgctggaaagg

SEQ ID NO: 287034 - DNA, 20 bp, synthetic construct
  source 1..20: mol_type = other DNA
tgaaaaatcttgctggaaag

SEQ ID NO: 287035 - DNA, 20 bp, synthetic construct
  source 1..20: mol_type = other DNA
ctgaaaaatcttgctggaaa

SEQ ID NO: 287036 - DNA, 20 bp, synthetic construct
  source 1..20: mol_type = other DNA
tctgaaaaatcttgctggaa

SEQ ID NO: 287037 - DNA, 20 bp, synthetic construct
  source 1..20: mol_type = other DNA
atctgaaaaatcttgctgga

SEQ ID NO: 287038 - DNA, 20 bp, synthetic construct
  source 1..20: mol_type = other DNA
catctgaaaaatcttgctgg

SEQ ID NO: 287039 - DNA, 20 bp, synthetic construct
  source 1..20: mol_type = other DNA
gcatctgaaaaatcttgctg

SEQ ID NO: 287040 - DNA, 20 bp, synthetic construct
  source 1..20: mol_type = other DNA
agcatctgaaaaatcttgct

SEQ ID NO: 287041 - DNA, 20 bp, synthetic construct
  source 1..20: mol_type = other DNA
cagcatctgaaaaatcttgc

SEQ ID NO: 287042 - DNA, 20 bp, synthetic construct
  source 1..20: mol_type = other DNA
acagcatctgaaaaatcttg

SEQ ID NO: 287043 - DNA, 20 bp, synthetic construct
  source 1..20: mol_type = other DNA
cacagcatctgaaaaatctt

SEQ ID NO: 287044 - DNA, 20 bp, synthetic construct
  source 1..20: mol_type = other DNA
gcacagcatctgaaaaatct

SEQ ID NO: 287045 - DNA, 20 bp, synthetic construct
  source 1..20: mol_type = other DNA
tgcacagcatctgaaaaatc

SEQ ID NO: 287046 - DNA, 20 bp, synthetic construct
  source 1..20: mol_type = other DNA
atgcacagcatctgaaaaat

SEQ ID NO: 287047 - DNA, 20 bp, synthetic construct
  source 1..20: mol_type = other DNA
tatgcacagcatctgaaaaa

SEQ ID NO: 287048 - DNA, 20 bp, synthetic construct
  source 1..20: mol_type = other DNA
gtatgcacagcatctgaaaa

SEQ ID NO: 287049 - DNA, 20 bp, synthetic construct
  source 1..20: mol_type = other DNA
agtatgcacagcatctgaaa

SEQ ID NO: 287050 - DNA, 20 bp, synthetic construct
  source 1..20: mol_type = other DNA
gagtatgcacagcatctgaa

SEQ ID NO: 287051 - DNA, 20 bp, synthetic construct
  source 1..20: mol_type = other DNA
tgagtatgcacagcatctga

SEQ ID NO: 287052 - DNA, 20 bp, synthetic construct
  source 1..20: mol_type = other DNA
atgagtatgcacagcatctg

SEQ ID NO: 287053 - DNA, 20 bp, synthetic construct
  source 1..20: mol_type = other DNA
gatgagtatgcacagcatct

SEQ ID NO: 287054 - DNA, 20 bp, synthetic construct
  source 1..20: mol_type = other DNA
tgatgagtatgcacagcatc

SEQ ID NO: 287055 - DNA, 20 bp, synthetic construct
  source 1..20: mol_type = other DNA
atgatgagtatgcacagcat

SEQ ID NO: 287056 - DNA, 20 bp, synthetic construct
  source 1..20: mol_type = other DNA
tatgatgagtatgcacagca

SEQ ID NO: 287057 - DNA, 20 bp, synthetic construct
  source 1..20: mol_type = other DNA
atatgatgagtatgcacagc

SEQ ID NO: 287058 - DNA, 20 bp, synthetic construct
  source 1..20: mol_type = other DNA
aatatgatgagtatgcacag

SEQ ID NO: 287059 - DNA, 20 bp, synthetic construct
  source 1..20: mol_type = other DNA
caatatgatgagtatgcaca

SEQ ID NO: 287060 - DNA, 20 bp, synthetic construct
  source 1..20: mol_type = other DNA
tcaatatgatgagtatgcac

SEQ ID NO: 287061 - DNA, 20 bp, synthetic construct
  source 1..20: mol_type = other DNA
atcaatatgatgagtatgca

SEQ ID NO: 287062 - DNA, 20 bp, synthetic construct
  source 1..20: mol_type = other DNA
gatcaatatgatgagtatgc

SEQ ID NO: 287063 - DNA, 20 bp, synthetic construct
  source 1..20: mol_type = other DNA
tgatcaatatgatgagtatg

SEQ ID NO: 287064 - DNA, 20 bp, synthetic construct
  source 1..20: mol_type = other DNA
gtgatcaatatgatgagtat

SEQ ID NO: 287065 - DNA, 20 bp, synthetic construct
  source 1..20: mol_type = other DNA
agtgatcaatatgatgagta

SEQ ID NO: 287066 - DNA, 20 bp, synthetic construct
  source 1..20: mol_type = other DNA
aagtgatcaatatgatgagt

SEQ ID NO: 287067 - DNA, 20 bp, synthetic construct
  source 1..20: mol_type = other DNA
aaagtgatcaatatgatgag

SEQ ID NO: 287068 - DNA, 20 bp, synthetic construct
  source 1..20: mol_type = other DNA
aaaagtgatcaatatgatga

SEQ ID NO: 287069 - DNA, 20 bp, synthetic construct
  source 1..20: mol_type = other DNA
aaaaagtgatcaatatgatg

SEQ ID NO: 287070 - DNA, 20 bp, synthetic construct
  source 1..20: mol_type = other DNA
aaaaaagtgatcaatatgat

SEQ ID NO: 287071 - DNA, 20 bp, synthetic construct
  source 1..20: mol_type = other DNA
gaaaaaagtgatcaatatga

SEQ ID NO: 287072 - DNA, 20 bp, synthetic construct
  source 1..20: mol_type = other DNA
agaaaaaagtgatcaatatg

SEQ ID NO: 287073 - DNA, 20 bp, synthetic construct
  source 1..20: mol_type = other DNA
aagaaaaaagtgatcaatat

SEQ ID NO: 287074 - DNA, 20 bp, synthetic construct
  source 1..20: mol_type = other DNA
gaagaaaaaagtgatcaata

SEQ ID NO: 287075 - DNA, 20 bp, synthetic construct
  source 1..20: mol_type = other DNA
tgaagaaaaaagtgatcaat

SEQ ID NO: 287076 - DNA, 20 bp, synthetic construct
  source 1..20: mol_type = other DNA
atgaagaaaaaagtgatcaa

SEQ ID NO: 287077 - DNA, 20 bp, synthetic construct
  source 1..20: mol_type = other DNA
catgaagaaaaaagtgatca

SEQ ID NO: 287078 - DNA, 20 bp, synthetic construct
  source 1..20: mol_type = other DNA
gcatgaagaaaaaagtgatc

SEQ ID NO: 287079 - DNA, 20 bp, synthetic construct
  source 1..20: mol_type = other DNA
ggcatgaagaaaaaagtgat

SEQ ID NO: 287080 - DNA, 20 bp, synthetic construct
  source 1..20: mol_type = other DNA
aggcatgaagaaaaaagtga

SEQ ID NO: 287081 - DNA, 20 bp, synthetic construct
  source 1..20: mol_type = other DNA
caggcatgaagaaaaaagtg

SEQ ID NO: 287082 - DNA, 20 bp, synthetic construct
  source 1..20: mol_type = other DNA
tcaggcatgaagaaaaaagt

SEQ ID NO: 287083 - DNA, 20 bp, synthetic construct
  source 1..20: mol_type = other DNA
atcaggcatgaagaaaaaag

SEQ ID NO: 287084 - DNA, 20 bp, synthetic construct
  source 1..20: mol_type = other DNA
aatcaggcatgaagaaaaaa

SEQ ID NO: 287085 - DNA, 20 bp, synthetic construct
  source 1..20: mol_type = other DNA
caatcaggcatgaagaaaaa

SEQ ID NO: 287086 - DNA, 20 bp, synthetic construct
  source 1..20: mol_type = other DNA
acaatcaggcatgaagaaaa

SEQ ID NO: 287087 - DNA, 20 bp, synthetic construct
  source 1..20: mol_type = other DNA
cacaatcaggcatgaagaaa

SEQ ID NO: 287088 - DNA, 20 bp, synthetic construct
  source 1..20: mol_type = other DNA
tcacaatcaggcatgaagaa

SEQ ID NO: 287089 - DNA, 20 bp, synthetic construct
  source 1..20: mol_type = other DNA
atcacaatcaggcatgaaga

SEQ ID NO: 287090 - DNA, 20 bp, synthetic construct
  source 1..20: mol_type = other DNA
gatcacaatcaggcatgaag

SEQ ID NO: 287091 - DNA, 20 bp, synthetic construct
  source 1..20: mol_type = other DNA
agatcacaatcaggcatgaa

SEQ ID NO: 287092 - DNA, 20 bp, synthetic construct
  source 1..20: mol_type = other DNA
cagatcacaatcaggcatga

SEQ ID NO: 287093 - DNA, 20 bp, synthetic construct
  source 1..20: mol_type = other DNA
acagatcacaatcaggcatg

SEQ ID NO: 287094 - DNA, 20 bp, synthetic construct
  source 1..20: mol_type = other DNA
gacagatcacaatcaggcat

SEQ ID NO: 287095 - DNA, 20 bp, synthetic construct
  source 1..20: mol_type = other DNA
tgacagatcacaatcaggca

SEQ ID NO: 287096 - DNA, 20 bp, synthetic construct
  source 1..20: mol_type = other DNA
ttgacagatcacaatcaggc

SEQ ID NO: 287097 - DNA, 20 bp, synthetic construct
  source 1..20: mol_type = other DNA
attgacagatcacaatcagg

SEQ ID NO: 287098 - DNA, 20 bp, synthetic construct
  source 1..20: mol_type = other DNA
aattgacagatcacaatcag

SEQ ID NO: 287099 - DNA, 20 bp, synthetic construct
  source 1..20: mol_type = other DNA
aaattgacagatcacaatca

SEQ ID NO: 287100 - DNA, 20 bp, synthetic construct
  source 1..20: mol_type = other DNA
gaaattgacagatcacaatc

SEQ ID NO: 287101 - DNA, 20 bp, synthetic construct
  source 1..20: mol_type = other DNA
tgaaattgacagatcacaat

SEQ ID NO: 287102 - DNA, 20 bp, synthetic construct
  source 1..20: mol_type = other DNA
atgaaattgacagatcacaa

SEQ ID NO: 287103 - DNA, 20 bp, synthetic construct
  source 1..20: mol_type = other DNA
catgaaattgacagatcaca

SEQ ID NO: 287104 - DNA, 20 bp, synthetic construct
  source 1..20: mol_type = other DNA
acatgaaattgacagatcac

SEQ ID NO: 287105 - DNA, 20 bp, synthetic construct
  source 1..20: mol_type = other DNA
gacatgaaattgacagatca

SEQ ID NO: 287106 - DNA, 20 bp, synthetic construct
  source 1..20: mol_type = other DNA
tgacatgaaattgacagatc

SEQ ID NO: 287107 - DNA, 20 bp, synthetic construct
  source 1..20: mol_type = other DNA
ctgacatgaaattgacagat

SEQ ID NO: 287108 - DNA, 20 bp, synthetic construct
  source 1..20: mol_type = other DNA
cctgacatgaaattgacaga

SEQ ID NO: 287109 - DNA, 20 bp, synthetic construct
  source 1..20: mol_type = other DNA
tcctgacatgaaattgacag

SEQ ID NO: 287110 - DNA, 20 bp, synthetic construct
  source 1..20: mol_type = other DNA
ttcctgacatgaaattgaca

SEQ ID NO: 287111 - DNA, 20 bp, synthetic construct
  source 1..20: mol_type = other DNA
tttcctgacatgaaattgac

SEQ ID NO: 287112 - DNA, 20 bp, synthetic construct
  source 1..20: mol_type = other DNA
ctttcctgacatgaaattga

SEQ ID NO: 287113 - DNA, 20 bp, synthetic construct
  source 1..20: mol_type = other DNA
cctttcctgacatgaaattg

SEQ ID NO: 287114 - DNA, 20 bp, synthetic construct
  source 1..20: mol_type = other DNA
ccctttcctgacatgaaatt

SEQ ID NO: 287115 - DNA, 20 bp, synthetic construct
  source 1..20: mol_type = other DNA
tccctttcctgacatgaaat

SEQ ID NO: 287116 - DNA, 20 bp, synthetic construct
  source 1..20: mol_type = other DNA
ctccctttcctgacatgaaa

SEQ ID NO: 287117 - DNA, 20 bp, synthetic construct
  source 1..20: mol_type = other DNA
actccctttcctgacatgaa

SEQ ID NO: 287118 - DNA, 20 bp, synthetic construct
  source 1..20: mol_type = other DNA
cactccctttcctgacatga

SEQ ID NO: 287119 - DNA, 20 bp, synthetic construct
  source 1..20: mol_type = other DNA
tcactccctttcctgacatg

SEQ ID NO: 287120 - DNA, 20 bp, synthetic construct
  source 1..20: mol_type = other DNA
gtcactccctttcctgacat

SEQ ID NO: 287121 - DNA, 20 bp, synthetic construct
  source 1..20: mol_type = other DNA
tgtcactccctttcctgaca

SEQ ID NO: 287122 - DNA, 20 bp, synthetic construct
  source 1..20: mol_type = other DNA
atgtcactccctttcctgac

SEQ ID NO: 287123 - DNA, 20 bp, synthetic construct
  source 1..20: mol_type = other DNA
aatgtcactccctttcctga

SEQ ID NO: 287124 - DNA, 20 bp, synthetic construct
  source 1..20: mol_type = other DNA
aaatgtcactccctttcctg

SEQ ID NO: 287125 - DNA, 20 bp, synthetic construct
  source 1..20: mol_type = other DNA
aaaatgtcactccctttcct

SEQ ID NO: 287126 - DNA, 20 bp, synthetic construct
  source 1..20: mol_type = other DNA
aaaaatgtcactccctttcc

SEQ ID NO: 287127 - DNA, 20 bp, synthetic construct
  source 1..20: mol_type = other DNA
taaaaatgtcactccctttc

SEQ ID NO: 287128 - DNA, 20 bp, synthetic construct
  source 1..20: mol_type = other DNA
gtaaaaatgtcactcccttt

SEQ ID NO: 287129 - DNA, 20 bp, synthetic construct
  source 1..20: mol_type = other DNA
tgtaaaaatgtcactccctt

SEQ ID NO: 287130 - DNA, 20 bp, synthetic construct
  source 1..20: mol_type = other DNA
gtgtaaaaatgtcactccct

SEQ ID NO: 287131 - DNA, 20 bp, synthetic construct
  source 1..20: mol_type = other DNA
agtgtaaaaatgtcactccc

SEQ ID NO: 287132 - DNA, 20 bp, synthetic construct
  source 1..20: mol_type = other DNA
aagtgtaaaaatgtcactcc

SEQ ID NO: 287133 - DNA, 20 bp, synthetic construct
  source 1..20: mol_type = other DNA
taagtgtaaaaatgtcactc

SEQ ID NO: 287134 - DNA, 20 bp, synthetic construct
  source 1..20: mol_type = other DNA
ttaagtgtaaaaatgtcact

SEQ ID NO: 287135 - DNA, 20 bp, synthetic construct
  source 1..20: mol_type = other DNA
cttaagtgtaaaaatgtcac

SEQ ID NO: 287136 - DNA, 20 bp, synthetic construct
  source 1..20: mol_type = other DNA
gcttaagtgtaaaaatgtca

SEQ ID NO: 287137 - DNA, 20 bp, synthetic construct
  source 1..20: mol_type = other DNA
cgcttaagtgtaaaaatgtc

SEQ ID NO: 287138 - DNA, 20 bp, synthetic construct
  source 1..20: mol_type = other DNA
acgcttaagtgtaaaaatgt

SEQ ID NO: 287139 - DNA, 20 bp, synthetic construct
  source 1..20: mol_type = other DNA
aacgcttaagtgtaaaaatg

SEQ ID NO: 287140 - DNA, 20 bp, synthetic construct
  source 1..20: mol_type = other DNA
aaacgcttaagtgtaaaaat

SEQ ID NO: 287141 - DNA, 20 bp, synthetic construct
  source 1..20: mol_type = other DNA
caaacgcttaagtgtaaaaa

SEQ ID NO: 287142 - DNA, 20 bp, synthetic construct
  source 1..20: mol_type = other DNA
gcaaacgcttaagtgtaaaa

SEQ ID NO: 287143 - DNA, 20 bp, synthetic construct
  source 1..20: mol_type = other DNA
agcaaacgcttaagtgtaaa

SEQ ID NO: 287144 - DNA, 20 bp, synthetic construct
  source 1..20: mol_type = other DNA
cagcaaacgcttaagtgtaa

SEQ ID NO: 287145 - DNA, 20 bp, synthetic construct
  source 1..20: mol_type = other DNA
tcagcaaacgcttaagtgta

SEQ ID NO: 287146 - DNA, 20 bp, synthetic construct
  source 1..20: mol_type = other DNA
ctcagcaaacgcttaagtgt

SEQ ID NO: 287147 - DNA, 20 bp, synthetic construct
  source 1..20: mol_type = other DNA
gctcagcaaacgcttaagtg

SEQ ID NO: 287148 - DNA, 20 bp, synthetic construct
  source 1..20: mol_type = other DNA
tgctcagcaaacgcttaagt

SEQ ID NO: 287149 - DNA, 20 bp, synthetic construct
  source 1..20: mol_type = other DNA
ttgctcagcaaacgcttaag

SEQ ID NO: 287150 - DNA, 20 bp, synthetic construct
  source 1..20: mol_type = other DNA
tttgctcagcaaacgcttaa

SEQ ID NO: 287151 - DNA, 20 bp, synthetic construct
  source 1..20: mol_type = other DNA
atttgctcagcaaacgctta

SEQ ID NO: 287152 - DNA, 20 bp, synthetic construct
  source 1..20: mol_type = other DNA
catttgctcagcaaacgctt

SEQ ID NO: 287153 - DNA, 20 bp, synthetic construct
  source 1..20: mol_type = other DNA
acatttgctcagcaaacgct

SEQ ID NO: 287154 - DNA, 20 bp, synthetic construct
  source 1..20: mol_type = other DNA
gacatttgctcagcaaacgc

SEQ ID NO: 287155 - DNA, 20 bp, synthetic construct
  source 1..20: mol_type = other DNA
agacatttgctcagcaaacg

SEQ ID NO: 287156 - DNA, 20 bp, synthetic construct
  source 1..20: mol_type = other DNA
cagacatttgctcagcaaac

SEQ ID NO: 287157 - DNA, 20 bp, synthetic construct
  source 1..20: mol_type = other DNA
ccagacatttgctcagcaaa

SEQ ID NO: 287158 - DNA, 20 bp, synthetic construct
  source 1..20: mol_type = other DNA
cccagacatttgctcagcaa

SEQ ID NO: 287159 - DNA, 20 bp, synthetic construct
  source 1..20: mol_type = other DNA
acccagacatttgctcagca

SEQ ID NO: 287160 - DNA, 20 bp, synthetic construct
  source 1..20: mol_type = other DNA
gacccagacatttgctcagc

SEQ ID NO: 287161 - DNA, 20 bp, synthetic construct
  source 1..20: mol_type = other DNA
agacccagacatttgctcag

SEQ ID NO: 287162 - DNA, 20 bp, synthetic construct
  source 1..20: mol_type = other DNA
aagacccagacatttgctca

SEQ ID NO: 287163 - DNA, 20 bp, synthetic construct
  source 1..20: mol_type = other DNA
caagacccagacatttgctc

SEQ ID NO: 287164 - DNA, 20 bp, synthetic construct
  source 1..20: mol_type = other DNA
gcaagacccagacatttgct

SEQ ID NO: 287165 - DNA, 20 bp, synthetic construct
  source 1..20: mol_type = other DNA
tgcaagacccagacatttgc

SEQ ID NO: 287166 - DNA, 20 bp, synthetic construct
  source 1..20: mol_type = other DNA
gtgcaagacccagacatttg

SEQ ID NO: 287167 - DNA, 20 bp, synthetic construct
  source 1..20: mol_type = other DNA
tgtgcaagacccagacattt

SEQ ID NO: 287168 - DNA, 20 bp, synthetic construct
  source 1..20: mol_type = other DNA
ttgtgcaagacccagacatt

SEQ ID NO: 287169 - DNA, 20 bp, synthetic construct
  source 1..20: mol_type = other DNA
attgtgcaagacccagacat

SEQ ID NO: 287170 - DNA, 20 bp, synthetic construct
  source 1..20: mol_type = other DNA
cattgtgcaagacccagaca

SEQ ID NO: 287171 - DNA, 20 bp, synthetic construct
  source 1..20: mol_type = other DNA
tcattgtgcaagacccagac

SEQ ID NO: 287172 - DNA, 20 bp, synthetic construct
  source 1..20: mol_type = other DNA
gtcattgtgcaagacccaga

SEQ ID NO: 287173 - DNA, 20 bp, synthetic construct
  source 1..20: mol_type = other DNA
tgtcattgtgcaagacccag

SEQ ID NO: 287174 - DNA, 20 bp, synthetic construct
  source 1..20: mol_type = other DNA
ttgtcattgtgcaagaccca

SEQ ID NO: 287175 - DNA, 20 bp, synthetic construct
  source 1..20: mol_type = other DNA
attgtcattgtgcaagaccc

SEQ ID NO: 287176 - DNA, 20 bp, synthetic construct
  source 1..20: mol_type = other DNA
cattgtcattgtgcaagacc

SEQ ID NO: 287177 - DNA, 20 bp, synthetic construct
  source 1..20: mol_type = other DNA
ccattgtcattgtgcaagac

SEQ ID NO: 287178 - DNA, 20 bp, synthetic construct
  source 1..20: mol_type = other DNA
cccattgtcattgtgcaaga

SEQ ID NO: 287179 - DNA, 20 bp, synthetic construct
  source 1..20: mol_type = other DNA
acccattgtcattgtgcaag

SEQ ID NO: 287180 - DNA, 20 bp, synthetic construct
  source 1..20: mol_type = other DNA
gacccattgtcattgtgcaa

SEQ ID NO: 287181 - DNA, 20 bp, synthetic construct
  source 1..20: mol_type = other DNA
ggacccattgtcattgtgca

SEQ ID NO: 287182 - DNA, 20 bp, synthetic construct
  source 1..20: mol_type = other DNA
gggacccattgtcattgtgc

SEQ ID NO: 287183 - DNA, 20 bp, synthetic construct
  source 1..20: mol_type = other DNA
agggacccattgtcattgtg

SEQ ID NO: 287184 - DNA, 20 bp, synthetic construct
  source 1..20: mol_type = other DNA
cagggacccattgtcattgt

SEQ ID NO: 287185 - DNA, 20 bp, synthetic construct
  source 1..20: mol_type = other DNA
acagggacccattgtcattg

SEQ ID NO: 287186 - DNA, 20 bp, synthetic construct
  source 1..20: mol_type = other DNA
aacagggacccattgtcatt

SEQ ID NO: 287187 - DNA, 20 bp, synthetic construct
  source 1..20: mol_type = other DNA
aaacagggacccattgtcat

SEQ ID NO: 287188 - DNA, 20 bp, synthetic construct
  source 1..20: mol_type = other DNA
aaaacagggacccattgtca

SEQ ID NO: 287189 - DNA, 20 bp, synthetic construct
  source 1..20: mol_type = other DNA
aaaaacagggacccattgtc

SEQ ID NO: 287190 - DNA, 20 bp, synthetic construct
  source 1..20: mol_type = other DNA
gaaaaacagggacccattgt

SEQ ID NO: 287191 - DNA, 20 bp, synthetic construct
  source 1..20: mol_type = other DNA
ggaaaaacagggacccattg

SEQ ID NO: 287192 - DNA, 20 bp, synthetic construct
  source 1..20: mol_type = other DNA
gggaaaaacagggacccatt

SEQ ID NO: 287193 - DNA, 20 bp, synthetic construct
  source 1..20: mol_type = other DNA
tgggaaaaacagggacccat

SEQ ID NO: 287194 - DNA, 20 bp, synthetic construct
  source 1..20: mol_type = other DNA
ctgggaaaaacagggaccca

SEQ ID NO: 287195 - DNA, 20 bp, synthetic construct
  source 1..20: mol_type = other DNA
tctgggaaaaacagggaccc

SEQ ID NO: 287196 - DNA, 20 bp, synthetic construct
  source 1..20: mol_type = other DNA
ctctgggaaaaacagggacc

SEQ ID NO: 287197 - DNA, 20 bp, synthetic construct
  source 1..20: mol_type = other DNA
cctctgggaaaaacagggac

SEQ ID NO: 287198 - DNA, 20 bp, synthetic construct
  source 1..20: mol_type = other DNA
gcctctgggaaaaacaggga

SEQ ID NO: 287199 - DNA, 20 bp, synthetic construct
  source 1..20: mol_type = other DNA
agcctctgggaaaaacaggg

SEQ ID NO: 287200 - DNA, 20 bp, synthetic construct
  source 1..20: mol_type = other DNA
gagcctctgggaaaaacagg

SEQ ID NO: 287201 - DNA, 20 bp, synthetic construct
  source 1..20: mol_type = other DNA
agagcctctgggaaaaacag

SEQ ID NO: 287202 - DNA, 20 bp, synthetic construct
  source 1..20: mol_type = other DNA
aagagcctctgggaaaaaca

SEQ ID NO: 287203 - DNA, 20 bp, synthetic construct
  source 1..20: mol_type = other DNA
aaagagcctctgggaaaaac

SEQ ID NO: 287204 - DNA, 20 bp, synthetic construct
  source 1..20: mol_type = other DNA
aaaagagcctctgggaaaaa

SEQ ID NO: 287205 - DNA, 20 bp, synthetic construct
  source 1..20: mol_type = other DNA
caaaagagcctctgggaaaa

SEQ ID NO: 287206 - DNA, 20 bp, synthetic construct
  source 1..20: mol_type = other DNA
acaaaagagcctctgggaaa

SEQ ID NO: 287207 - DNA, 20 bp, synthetic construct
  source 1..20: mol_type = other DNA
aacaaaagagcctctgggaa

SEQ ID NO: 287208 - DNA, 20 bp, synthetic construct
  source 1..20: mol_type = other DNA
gaacaaaagagcctctggga

SEQ ID NO: 287209 - DNA, 20 bp, synthetic construct
  source 1..20: mol_type = other DNA
agaacaaaagagcctctggg

SEQ ID NO: 287210 - DNA, 20 bp, synthetic construct
  source 1..20: mol_type = other DNA
cagaacaaaagagcctctgg

SEQ ID NO: 287211 - DNA, 20 bp, synthetic construct
  source 1..20: mol_type = other DNA
gcagaacaaaagagcctctg

SEQ ID NO: 287212 - DNA, 20 bp, synthetic construct
  source 1..20: mol_type = other DNA
tgcagaacaaaagagcctct

SEQ ID NO: 287213 - DNA, 20 bp, synthetic construct
  source 1..20: mol_type = other DNA
ctgcagaacaaaagagcctc

SEQ ID NO: 287214 - DNA, 20 bp, synthetic construct
  source 1..20: mol_type = other DNA
cctgcagaacaaaagagcct

SEQ ID NO: 287215 - DNA, 20 bp, synthetic construct
  source 1..20: mol_type = other DNA
ccctgcagaacaaaagagcc

SEQ ID NO: 287216 - DNA, 20 bp, synthetic construct
  source 1..20: mol_type = other DNA
tccctgcagaacaaaagagc

SEQ ID NO: 287217 - DNA, 20 bp, synthetic construct
  source 1..20: mol_type = other DNA
atccctgcagaacaaaagag

SEQ ID NO: 287218 - DNA, 20 bp, synthetic construct
  source 1..20: mol_type = other DNA
aatccctgcagaacaaaaga

SEQ ID NO: 287219 - DNA, 20 bp, synthetic construct
  source 1..20: mol_type = other DNA
caatccctgcagaacaaaag

SEQ ID NO: 287220 - DNA, 20 bp, synthetic construct
  source 1..20: mol_type = other DNA
tcaatccctgcagaacaaaa

SEQ ID NO: 287221 - DNA, 20 bp, synthetic construct
  source 1..20: mol_type = other DNA
ttcaatccctgcagaacaaa

SEQ ID NO: 287222 - DNA, 20 bp, synthetic construct
  source 1..20: mol_type = other DNA
cttcaatccctgcagaacaa

SEQ ID NO: 287223 - DNA, 20 bp, synthetic construct
  source 1..20: mol_type = other DNA
tcttcaatccctgcagaaca

SEQ ID NO: 287224 - DNA, 20 bp, synthetic construct
  source 1..20: mol_type = other DNA
gtcttcaatccctgcagaac

SEQ ID NO: 287225 - DNA, 20 bp, synthetic construct
  source 1..20: mol_type = other DNA
tgtcttcaatccctgcagaa

SEQ ID NO: 287226 - DNA, 20 bp, synthetic construct
  source 1..20: mol_type = other DNA
gtgtcttcaatccctgcaga

SEQ ID NO: 287227 - DNA, 20 bp, synthetic construct
  source 1..20: mol_type = other DNA
agtgtcttcaatccctgcag

SEQ ID NO: 287228 - DNA, 20 bp, synthetic construct
  source 1..20: mol_type = other DNA
gagtgtcttcaatccctgca

SEQ ID NO: 287229 - DNA, 20 bp, synthetic construct
  source 1..20: mol_type = other DNA
ggagtgtcttcaatccctgc

SEQ ID NO: 287230 - DNA, 20 bp, synthetic construct
  source 1..20: mol_type = other DNA
tggagtgtcttcaatccctg

SEQ ID NO: 287231 - DNA, 20 bp, synthetic construct
  source 1..20: mol_type = other DNA
ctggagtgtcttcaatccct

SEQ ID NO: 287232 - DNA, 20 bp, synthetic construct
  source 1..20: mol_type = other DNA
actggagtgtcttcaatccc

SEQ ID NO: 287233 - DNA, 20 bp, synthetic construct
  source 1..20: mol_type = other DNA
gactggagtgtcttcaatcc

SEQ ID NO: 287234 - DNA, 20 bp, synthetic construct
  source 1..20: mol_type = other DNA
ggactggagtgtcttcaatc

SEQ ID NO: 287235 - DNA, 20 bp, synthetic construct
  source 1..20: mol_type = other DNA
gggactggagtgtcttcaat

SEQ ID NO: 287236 - DNA, 20 bp, synthetic construct
  source 1..20: mol_type = other DNA
tgggactggagtgtcttcaa

SEQ ID NO: 287237 - DNA, 20 bp, synthetic construct
  source 1..20: mol_type = other DNA
gtgggactggagtgtcttca

SEQ ID NO: 287238 - DNA, 20 bp, synthetic construct
  source 1..20: mol_type = other DNA
tgtgggactggagtgtcttc

SEQ ID NO: 287239 - DNA, 20 bp, synthetic construct
  source 1..20: mol_type = other DNA
ctgtgggactggagtgtctt

SEQ ID NO: 287240 - DNA, 20 bp, synthetic construct
  source 1..20: mol_type = other DNA
actgtgggactggagtgtct

SEQ ID NO: 287241 - DNA, 20 bp, synthetic construct
  source 1..20: mol_type = other DNA
gactgtgggactggagtgtc

SEQ ID NO: 287242 - DNA, 20 bp, synthetic construct
  source 1..20: mol_type = other DNA
ggactgtgggactggagtgt

SEQ ID NO: 287243 - DNA, 20 bp, synthetic construct
  source 1..20: mol_type = other DNA
gggactgtgggactggagtg

SEQ ID NO: 287244 - DNA, 20 bp, synthetic construct
  source 1..20: mol_type = other DNA
ggggactgtgggactggagt

SEQ ID NO: 287245 - DNA, 20 bp, synthetic construct
  source 1..20: mol_type = other DNA
tggggactgtgggactggag

SEQ ID NO: 287246 - DNA, 20 bp, synthetic construct
  source 1..20: mol_type = other DNA
ctggggactgtgggactgga

SEQ ID NO: 287247 - DNA, 20 bp, synthetic construct
  source 1..20: mol_type = other DNA
gctggggactgtgggactgg

SEQ ID NO: 287248 - DNA, 20 bp, synthetic construct
  source 1..20: mol_type = other DNA
agctggggactgtgggactg

SEQ ID NO: 287249 - DNA, 20 bp, synthetic construct
  source 1..20: mol_type = other DNA
gagctggggactgtgggact

SEQ ID NO: 287250 - DNA, 20 bp, synthetic construct
  source 1..20: mol_type = other DNA
ggagctggggactgtgggac

SEQ ID NO: 287251 - DNA, 20 bp, synthetic construct
  source 1..20: mol_type = other DNA
gggagctggggactgtggga

SEQ ID NO: 287252 - DNA, 20 bp, synthetic construct
  source 1..20: mol_type = other DNA
ggggagctggggactgtggg

SEQ ID NO: 287253 - DNA, 20 bp, synthetic construct
  source 1..20: mol_type = other DNA
aggggagctggggactgtgg

SEQ ID NO: 287254 - DNA, 20 bp, synthetic construct
  source 1..20: mol_type = other DNA
caggggagctggggactgtg

SEQ ID NO: 287255 - DNA, 20 bp, synthetic construct
  source 1..20: mol_type = other DNA
ccaggggagctggggactgt

SEQ ID NO: 287256 - DNA, 20 bp, synthetic construct
  source 1..20: mol_type = other DNA
cccaggggagctggggactg

SEQ ID NO: 287257 - DNA, 20 bp, synthetic construct
  source 1..20: mol_type = other DNA
ccccaggggagctggggact

SEQ ID NO: 287258 - DNA, 20 bp, synthetic construct
  source 1..20: mol_type = other DNA
gccccaggggagctggggac

SEQ ID NO: 287259 - DNA, 20 bp, synthetic construct
  source 1..20: mol_type = other DNA
tgccccaggggagctgggga

SEQ ID NO: 287260 - DNA, 20 bp, synthetic construct
  source 1..20: mol_type = other DNA
ctgccccaggggagctgggg

SEQ ID NO: 287261 - DNA, 20 bp, synthetic construct
  source 1..20: mol_type = other DNA
cctgccccaggggagctggg

SEQ ID NO: 287262 - DNA, 20 bp, synthetic construct
  source 1..20: mol_type = other DNA
ccctgccccaggggagctgg

SEQ ID NO: 287263 - DNA, 20 bp, synthetic construct
  source 1..20: mol_type = other DNA
accctgccccaggggagctg

SEQ ID NO: 287264 - DNA, 20 bp, synthetic construct
  source 1..20: mol_type = other DNA
aaccctgccccaggggagct

SEQ ID NO: 287265 - DNA, 20 bp, synthetic construct
  source 1..20: mol_type = other DNA
caaccctgccccaggggagc

SEQ ID NO: 287266 - DNA, 20 bp, synthetic construct
  source 1..20: mol_type = other DNA
ccaaccctgccccaggggag

SEQ ID NO: 287267 - DNA, 20 bp, synthetic construct
  source 1..20: mol_type = other DNA
gccaaccctgccccagggga

SEQ ID NO: 287268 - DNA, 20 bp, synthetic construct
  source 1..20: mol_type = other DNA
tgccaaccctgccccagggg

SEQ ID NO: 287269 - DNA, 20 bp, synthetic construct
  source 1..20: mol_type = other DNA
ctgccaaccctgccccaggg

SEQ ID NO: 287270 - DNA, 20 bp, synthetic construct
  source 1..20: mol_type = other DNA
tctgccaaccctgccccagg

SEQ ID NO: 287271 - DNA, 20 bp, synthetic construct
  source 1..20: mol_type = other DNA
ttctgccaaccctgccccag

SEQ ID NO: 287272 - DNA, 20 bp, synthetic construct
  source 1..20: mol_type = other DNA
attctgccaaccctgcccca

SEQ ID NO: 287273 - DNA, 20 bp, synthetic construct
  source 1..20: mol_type = other DNA
aattctgccaaccctgcccc

SEQ ID NO: 287274 - DNA, 20 bp, synthetic construct
  source 1..20: mol_type = other DNA
aaattctgccaaccctgccc

SEQ ID NO: 287275 - DNA, 20 bp, synthetic construct
  source 1..20: mol_type = other DNA
gaaattctgccaaccctgcc

SEQ ID NO: 287276 - DNA, 20 bp, synthetic construct
  source 1..20: mol_type = other DNA
cgaaattctgccaaccctgc

SEQ ID NO: 287277 - DNA, 20 bp, synthetic construct
  source 1..20: mol_type = other DNA
tcgaaattctgccaaccctg

SEQ ID NO: 287278 - DNA, 20 bp, synthetic construct
  source 1..20: mol_type = other DNA
gtcgaaattctgccaaccct

SEQ ID NO: 287279 - DNA, 20 bp, synthetic construct
  source 1..20: mol_type = other DNA
tgtcgaaattctgccaaccc

SEQ ID NO: 287280 - DNA, 20 bp, synthetic construct
  source 1..20: mol_type = other DNA
ttgtcgaaattctgccaacc

SEQ ID NO: 287281 - DNA, 20 bp, synthetic construct
  source 1..20: mol_type = other DNA
gttgtcgaaattctgccaac

SEQ ID NO: 287282 - DNA, 20 bp, synthetic construct
  source 1..20: mol_type = other DNA
tgttgtcgaaattctgccaa

SEQ ID NO: 287283 - DNA, 20 bp, synthetic construct
  source 1..20: mol_type = other DNA
gtgttgtcgaaattctgcca

SEQ ID NO: 287284 - DNA, 20 bp, synthetic construct
  source 1..20: mol_type = other DNA
tgtgttgtcgaaattctgcc

SEQ ID NO: 287285 - DNA, 20 bp, synthetic construct
  source 1..20: mol_type = other DNA
atgtgttgtcgaaattctgc

SEQ ID NO: 287286 - DNA, 20 bp, synthetic construct
  source 1..20: mol_type = other DNA
aatgtgttgtcgaaattctg

SEQ ID NO: 287287 - DNA, 20 bp, synthetic construct
  source 1..20: mol_type = other DNA
aaatgtgttgtcgaaattct

SEQ ID NO: 287288 - DNA, 20 bp, synthetic construct
  source 1..20: mol_type = other DNA
aaaatgtgttgtcgaaattc

SEQ ID NO: 287289 - DNA, 20 bp, synthetic construct
  source 1..20: mol_type = other DNA
aaaaatgtgttgtcgaaatt

SEQ ID NO: 287290 - DNA, 20 bp, synthetic construct
  source 1..20: mol_type = other DNA
gaaaaatgtgttgtcgaaat

SEQ ID NO: 287291 - DNA, 20 bp, synthetic construct
  source 1..20: mol_type = other DNA
ggaaaaatgtgttgtcgaaa

SEQ ID NO: 287292 - DNA, 20 bp, synthetic construct
  source 1..20: mol_type = other DNA
tggaaaaatgtgttgtcgaa

SEQ ID NO: 287293 - DNA, 20 bp, synthetic construct
  source 1..20: mol_type = other DNA
gtggaaaaatgtgttgtcga

SEQ ID NO: 287294 - DNA, 20 bp, synthetic construct
  source 1..20: mol_type = other DNA
ggtggaaaaatgtgttgtcg

SEQ ID NO: 287295 - DNA, 20 bp, synthetic construct
  source 1..20: mol_type = other DNA
gggtggaaaaatgtgttgtc

SEQ ID NO: 287296 - DNA, 20 bp, synthetic construct
  source 1..20: mol_type = other DNA
agggtggaaaaatgtgttgt

SEQ ID NO: 287297 - DNA, 20 bp, synthetic construct
  source 1..20: mol_type = other DNA
cagggtggaaaaatgtgttg

SEQ ID NO: 287298 - DNA, 20 bp, synthetic construct
  source 1..20: mol_type = other DNA
tcagggtggaaaaatgtgtt

SEQ ID NO: 287299 - DNA, 20 bp, synthetic construct
  source 1..20: mol_type = other DNA
gtcagggtggaaaaatgtgt

SEQ ID NO: 287300 - DNA, 20 bp, synthetic construct
  source 1..20: mol_type = other DNA
agtcagggtggaaaaatgtg

SEQ ID NO: 287301 - DNA, 20 bp, synthetic construct
  source 1..20: mol_type = other DNA
tagtcagggtggaaaaatgt

SEQ ID NO: 287302 - DNA, 20 bp, synthetic construct
  source 1..20: mol_type = other DNA
ctagtcagggtggaaaaatg

SEQ ID NO: 287303 - DNA, 20 bp, synthetic construct
  source 1..20: mol_type = other DNA
cctagtcagggtggaaaaat

SEQ ID NO: 287304 - DNA, 20 bp, synthetic construct
  source 1..20: mol_type = other DNA
tcctagtcagggtggaaaaa

SEQ ID NO: 287305 - DNA, 20 bp, synthetic construct
  source 1..20: mol_type = other DNA
atcctagtcagggtggaaaa

SEQ ID NO: 287306 - DNA, 20 bp, synthetic construct
  source 1..20: mol_type = other DNA
catcctagtcagggtggaaa

SEQ ID NO: 287307 - DNA, 20 bp, synthetic construct
  source 1..20: mol_type = other DNA
acatcctagtcagggtggaa

SEQ ID NO: 287308 - DNA, 20 bp, synthetic construct
  source 1..20: mol_type = other DNA
cacatcctagtcagggtgga

SEQ ID NO: 287309 - DNA, 20 bp, synthetic construct
  source 1..20: mol_type = other DNA
gcacatcctagtcagggtgg

SEQ ID NO: 287310 - DNA, 20 bp, synthetic construct
  source 1..20: mol_type = other DNA
agcacatcctagtcagggtg

SEQ ID NO: 287311 - DNA, 20 bp, synthetic construct
  source 1..20: mol_type = other DNA
gagcacatcctagtcagggt

SEQ ID NO: 287312 - DNA, 20 bp, synthetic construct
  source 1..20: mol_type = other DNA
ggagcacatcctagtcaggg

SEQ ID NO: 287313 - DNA, 20 bp, synthetic construct
  source 1..20: mol_type = other DNA
aggagcacatcctagtcagg

SEQ ID NO: 287314 - DNA, 20 bp, synthetic construct
  source 1..20: mol_type = other DNA
gaggagcacatcctagtcag

SEQ ID NO: 287315 - DNA, 20 bp, synthetic construct
  source 1..20: mol_type = other DNA
tgaggagcacatcctagtca

SEQ ID NO: 287316 - DNA, 20 bp, synthetic construct
  source 1..20: mol_type = other DNA
atgaggagcacatcctagtc

SEQ ID NO: 287317 - DNA, 20 bp, synthetic construct
  source 1..20: mol_type = other DNA
catgaggagcacatcctagt

SEQ ID NO: 287318 - DNA, 20 bp, synthetic construct
  source 1..20: mol_type = other DNA
ccatgaggagcacatcctag

SEQ ID NO: 287319 - DNA, 20 bp, synthetic construct
  source 1..20: mol_type = other DNA
gccatgaggagcacatccta

SEQ ID NO: 287320 - DNA, 20 bp, synthetic construct
  source 1..20: mol_type = other DNA
tgccatgaggagcacatcct

SEQ ID NO: 287321 - DNA, 20 bp, synthetic construct
  source 1..20: mol_type = other DNA
ctgccatgaggagcacatcc

SEQ ID NO: 287322 - DNA, 20 bp, synthetic construct
  source 1..20: mol_type = other DNA
gctgccatgaggagcacatc

SEQ ID NO: 287323 - DNA, 20 bp, synthetic construct
  source 1..20: mol_type = other DNA
agctgccatgaggagcacat

SEQ ID NO: 287324 - DNA, 20 bp, synthetic construct
  source 1..20: mol_type = other DNA
cagctgccatgaggagcaca

SEQ ID NO: 287325 - DNA, 20 bp, synthetic construct
  source 1..20: mol_type = other DNA
ccagctgccatgaggagcac

SEQ ID NO: 287326 - DNA, 20 bp, synthetic construct
  source 1..20: mol_type = other DNA
cccagctgccatgaggagca

SEQ ID NO: 287327 - DNA, 20 bp, synthetic construct
  source 1..20: mol_type = other DNA
tcccagctgccatgaggagc

SEQ ID NO: 287328 - DNA, 20 bp, synthetic construct
  source 1..20: mol_type = other DNA
ttcccagctgccatgaggag

SEQ ID NO: 287329 - DNA, 20 bp, synthetic construct
  source 1..20: mol_type = other DNA
gttcccagctgccatgagga

SEQ ID NO: 287330 - DNA, 20 bp, synthetic construct
  source 1..20: mol_type = other DNA
ggttcccagctgccatgagg

SEQ ID NO: 287331 - DNA, 20 bp, synthetic construct
  source 1..20: mol_type = other DNA
tggttcccagctgccatgag

SEQ ID NO: 287332 - DNA, 20 bp, synthetic construct
  source 1..20: mol_type = other DNA
gtggttcccagctgccatga

SEQ ID NO: 287333 - DNA, 20 bp, synthetic construct
  source 1..20: mol_type = other DNA
agtggttcccagctgccatg

SEQ ID NO: 287334 - DNA, 20 bp, synthetic construct
  source 1..20: mol_type = other DNA
cagtggttcccagctgccat

SEQ ID NO: 287335 - DNA, 20 bp, synthetic construct
  source 1..20: mol_type = other DNA
acagtggttcccagctgcca

SEQ ID NO: 287336 - DNA, 20 bp, synthetic construct
  source 1..20: mol_type = other DNA
gacagtggttcccagctgcc

SEQ ID NO: 287337 - DNA, 20 bp, synthetic construct
  source 1..20: mol_type = other DNA
ggacagtggttcccagctgc

SEQ ID NO: 287338 - DNA, 20 bp, synthetic construct
  source 1..20: mol_type = other DNA
tggacagtggttcccagctg

SEQ ID NO: 287339 - DNA, 20 bp, synthetic construct
  source 1..20: mol_type = other DNA
ttggacagtggttcccagct

SEQ ID NO: 287340 - DNA, 20 bp, synthetic construct
  source 1..20: mol_type = other DNA
attggacagtggttcccagc

SEQ ID NO: 287341 - DNA, 20 bp, synthetic construct
  source 1..20: mol_type = other DNA
tattggacagtggttcccag

SEQ ID NO: 287342 - DNA, 20 bp, synthetic construct
  source 1..20: mol_type = other DNA
ttattggacagtggttccca

SEQ ID NO: 287343 - DNA, 20 bp, synthetic construct
  source 1..20: mol_type = other DNA
cttattggacagtggttccc

SEQ ID NO: 287344 - DNA, 20 bp, synthetic construct
  source 1..20: mol_type = other DNA
ccttattggacagtggttcc

SEQ ID NO: 287345 - DNA, 20 bp, synthetic construct
  source 1..20: mol_type = other DNA
cccttattggacagtggttc

SEQ ID NO: 287346 - DNA, 20 bp, synthetic construct
  source 1..20: mol_type = other DNA
gcccttattggacagtggtt

SEQ ID NO: 287347 - DNA, 20 bp, synthetic construct
  source 1..20: mol_type = other DNA
ggcccttattggacagtggt

SEQ ID NO: 287348 - DNA, 20 bp, synthetic construct
  source 1..20: mol_type = other DNA
aggcccttattggacagtgg

SEQ ID NO: 287349 - DNA, 20 bp, synthetic construct
  source 1..20: mol_type = other DNA
caggcccttattggacagtg

SEQ ID NO: 287350 - DNA, 20 bp, synthetic construct
  source 1..20: mol_type = other DNA
ccaggcccttattggacagt

SEQ ID NO: 287351 - DNA, 20 bp, synthetic construct
  source 1..20: mol_type = other DNA
cccaggcccttattggacag

SEQ ID NO: 287352 - DNA, 20 bp, synthetic construct
  source 1..20: mol_type = other DNA
gcccaggcccttattggaca

SEQ ID NO: 287353 - DNA, 20 bp, synthetic construct
  source 1..20: mol_type = other DNA
agcccaggcccttattggac

SEQ ID NO: 287354 - DNA, 20 bp, synthetic construct
  source 1..20: mol_type = other DNA
aagcccaggcccttattgga

SEQ ID NO: 287355 - DNA, 20 bp, synthetic construct
  source 1..20: mol_type = other DNA
taagcccaggcccttattgg

SEQ ID NO: 287356 - DNA, 20 bp, synthetic construct
  source 1..20: mol_type = other DNA
gtaagcccaggcccttattg

SEQ ID NO: 287357 - DNA, 20 bp, synthetic construct
  source 1..20: mol_type = other DNA
tgtaagcccaggcccttatt

SEQ ID NO: 287358 - DNA, 20 bp, synthetic construct
  source 1..20: mol_type = other DNA
gtgtaagcccaggcccttat

SEQ ID NO: 287359 - DNA, 20 bp, synthetic construct
  source 1..20: mol_type = other DNA
tgtgtaagcccaggccctta

SEQ ID NO: 287360 - DNA, 20 bp, synthetic construct
  source 1..20: mol_type = other DNA
ctgtgtaagcccaggccctt

SEQ ID NO: 287361 - DNA, 20 bp, synthetic construct
  source 1..20: mol_type = other DNA
gctgtgtaagcccaggccct

SEQ ID NO: 287362 - DNA, 20 bp, synthetic construct
  source 1..20: mol_type = other DNA
agctgtgtaagcccaggccc

SEQ ID NO: 287363 - DNA, 20 bp, synthetic construct
  source 1..20: mol_type = other DNA
cagctgtgtaagcccaggcc

SEQ ID NO: 287364 - DNA, 20 bp, synthetic construct
  source 1..20: mol_type = other DNA
gcagctgtgtaagcccaggc

SEQ ID NO: 287365 - DNA, 20 bp, synthetic construct
  source 1..20: mol_type = other DNA
agcagctgtgtaagcccagg

SEQ ID NO: 287366 - DNA, 20 bp, synthetic construct
  source 1..20: mol_type = other DNA
aagcagctgtgtaagcccag

SEQ ID NO: 287367 - DNA, 20 bp, synthetic construct
  source 1..20: mol_type = other DNA
gaagcagctgtgtaagccca

SEQ ID NO: 287368 - DNA, 20 bp, synthetic construct
  source 1..20: mol_type = other DNA
agaagcagctgtgtaagccc

SEQ ID NO: 287369 - DNA, 20 bp, synthetic construct
  source 1..20: mol_type = other DNA
gagaagcagctgtgtaagcc

SEQ ID NO: 287370 - DNA, 20 bp, synthetic construct
  source 1..20: mol_type = other DNA
tgagaagcagctgtgtaagc

SEQ ID NO: 287371 - DNA, 20 bp, synthetic construct
  source 1..20: mol_type = other DNA
atgagaagcagctgtgtaag

SEQ ID NO: 287372 - DNA, 20 bp, synthetic construct
  source 1..20: mol_type = other DNA
aatgagaagcagctgtgtaa

SEQ ID NO: 287373 - DNA, 20 bp, synthetic construct
  source 1..20: mol_type = other DNA
caatgagaagcagctgtgta

SEQ ID NO: 287374 - DNA, 20 bp, synthetic construct
  source 1..20: mol_type = other DNA
tcaatgagaagcagctgtgt

SEQ ID NO: 287375 - DNA, 20 bp, synthetic construct
  source 1..20: mol_type = other DNA
ctcaatgagaagcagctgtg

SEQ ID NO: 287376 - DNA, 20 bp, synthetic construct
  source 1..20: mol_type = other DNA
actcaatgagaagcagctgt

SEQ ID NO: 287377 - DNA, 20 bp, synthetic construct
  source 1..20: mol_type = other DNA
aactcaatgagaagcagctg

SEQ ID NO: 287378 - DNA, 20 bp, synthetic construct
  source 1..20: mol_type = other DNA
taactcaatgagaagcagct

SEQ ID NO: 287379 - DNA, 20 bp, synthetic construct
  source 1..20: mol_type = other DNA
gtaactcaatgagaagcagc

SEQ ID NO: 287380 - DNA, 20 bp, synthetic construct
  source 1..20: mol_type = other DNA
tgtaactcaatgagaagcag

SEQ ID NO: 287381 - DNA, 20 bp, synthetic construct
  source 1..20: mol_type = other DNA
gtgtaactcaatgagaagca

SEQ ID NO: 287382 - DNA, 20 bp, synthetic construct
  source 1..20: mol_type = other DNA
ggtgtaactcaatgagaagc

SEQ ID NO: 287383 - DNA, 20 bp, synthetic construct
  source 1..20: mol_type = other DNA
gggtgtaactcaatgagaag

SEQ ID NO: 287384 - DNA, 20 bp, synthetic construct
  source 1..20: mol_type = other DNA
agggtgtaactcaatgagaa

SEQ ID NO: 287385 - DNA, 20 bp, synthetic construct
  source 1..20: mol_type = other DNA
aagggtgtaactcaatgaga

SEQ ID NO: 287386 - DNA, 20 bp, synthetic construct
  source 1..20: mol_type = other DNA
taagggtgtaactcaatgag

SEQ ID NO: 287387 - DNA, 20 bp, synthetic construct
  source 1..20: mol_type = other DNA
ttaagggtgtaactcaatga

SEQ ID NO: 287388 - DNA, 20 bp, synthetic construct
  source 1..20: mol_type = other DNA
attaagggtgtaactcaatg

SEQ ID NO: 287389 - DNA, 20 bp, synthetic construct
  source 1..20: mol_type = other DNA
tattaagggtgtaactcaat

SEQ ID NO: 287390 - DNA, 20 bp, synthetic construct
  source 1..20: mol_type = other DNA
ttattaagggtgtaactcaa

SEQ ID NO: 287391 - DNA, 20 bp, synthetic construct
  source 1..20: mol_type = other DNA
tttattaagggtgtaactca

SEQ ID NO: 287392 - DNA, 20 bp, synthetic construct
  source 1..20: mol_type = other DNA
ttttattaagggtgtaactc

SEQ ID NO: 287393 - DNA, 20 bp, synthetic construct
  source 1..20: mol_type = other DNA
attttattaagggtgtaact

SEQ ID NO: 287394 - DNA, 20 bp, synthetic construct
  source 1..20: mol_type = other DNA
tattttattaagggtgtaac

SEQ ID NO: 287395 - DNA, 20 bp, synthetic construct
  source 1..20: mol_type = other DNA
ttattttattaagggtgtaa

SEQ ID NO: 287396 - DNA, 20 bp, synthetic construct
  source 1..20: mol_type = other DNA
attattttattaagggtgta

SEQ ID NO: 287397 - DNA, 20 bp, synthetic construct
  source 1..20: mol_type = other DNA
gattattttattaagggtgt

SEQ ID NO: 287398 - DNA, 20 bp, synthetic construct
  source 1..20: mol_type = other DNA
ggattattttattaagggtg

SEQ ID NO: 287399 - DNA, 20 bp, synthetic construct
  source 1..20: mol_type = other DNA
gggattattttattaagggt

SEQ ID NO: 287400 - DNA, 20 bp, synthetic construct
  source 1..20: mol_type = other DNA
tgggattattttattaaggg

SEQ ID NO: 287401 - DNA, 20 bp, synthetic construct
  source 1..20: mol_type = other DNA
atgggattattttattaagg

SEQ ID NO: 287402 - DNA, 20 bp, synthetic construct
  source 1..20: mol_type = other DNA
aatgggattattttattaag

SEQ ID NO: 287403 - DNA, 20 bp, synthetic construct
  source 1..20: mol_type = other DNA
aaatgggattattttattaa

SEQ ID NO: 287404 - DNA, 20 bp, synthetic construct
  source 1..20: mol_type = other DNA
aaaatgggattattttatta

SEQ ID NO: 287405 - DNA, 20 bp, synthetic construct
  source 1..20: mol_type = other DNA
taaaatgggattattttatt

SEQ ID NO: 287406 - DNA, 20 bp, synthetic construct
  source 1..20: mol_type = other DNA
ataaaatgggattattttat

SEQ ID NO: 287407 - DNA, 20 bp, synthetic construct
  source 1..20: mol_type = other DNA
gataaaatgggattatttta

SEQ ID NO: 287408 - DNA, 20 bp, synthetic construct
  source 1..20: mol_type = other DNA
ggataaaatgggattatttt

SEQ ID NO: 287409 - DNA, 20 bp, synthetic construct
  source 1..20: mol_type = other DNA
aggataaaatgggattattt

SEQ ID NO: 287410 - DNA, 20 bp, synthetic construct
  source 1..20: mol_type = other DNA
aaggataaaatgggattatt

SEQ ID NO: 287411 - DNA, 20 bp, synthetic construct
  source 1..20: mol_type = other DNA
aaaggataaaatgggattat

SEQ ID NO: 287412 - DNA, 20 bp, synthetic construct
  source 1..20: mol_type = other DNA
aaaaggataaaatgggatta

SEQ ID NO: 287413 - DNA, 20 bp, synthetic construct
  source 1..20: mol_type = other DNA
aaaaaggataaaatgggatt

SEQ ID NO: 287414 - DNA, 20 bp, synthetic construct
  source 1..20: mol_type = other DNA
caaaaaggataaaatgggat

SEQ ID NO: 287415 - DNA, 20 bp, synthetic construct
  source 1..20: mol_type = other DNA
acaaaaaggataaaatggga

SEQ ID NO: 287416 - DNA, 20 bp, synthetic construct
  source 1..20: mol_type = other DNA
gacaaaaaggataaaatggg

SEQ ID NO: 287417 - DNA, 20 bp, synthetic construct
  source 1..20: mol_type = other DNA
agacaaaaaggataaaatgg

SEQ ID NO: 287418 - DNA, 20 bp, synthetic construct
  source 1..20: mol_type = other DNA
gagacaaaaaggataaaatg

SEQ ID NO: 287419 - DNA, 20 bp, synthetic construct
  source 1..20: mol_type = other DNA
agagacaaaaaggataaaat

SEQ ID NO: 287420 - DNA, 20 bp, synthetic construct
  source 1..20: mol_type = other DNA
gagagacaaaaaggataaaa

SEQ ID NO: 287421 - DNA, 20 bp, synthetic construct
  source 1..20: mol_type = other DNA
agagagacaaaaaggataaa

SEQ ID NO: 287422 - DNA, 20 bp, synthetic construct
  source 1..20: mol_type = other DNA
cagagagacaaaaaggataa

SEQ ID NO: 287423 - DNA, 20 bp, synthetic construct
  source 1..20: mol_type = other DNA
acagagagacaaaaaggata

SEQ ID NO: 287424 - DNA, 20 bp, synthetic construct
  source 1..20: mol_type = other DNA
gacagagagacaaaaaggat

SEQ ID NO: 287425 - DNA, 20 bp, synthetic construct
  source 1..20: mol_type = other DNA
agacagagagacaaaaagga

SEQ ID NO: 287426 - DNA, 20 bp, synthetic construct
  source 1..20: mol_type = other DNA
aagacagagagacaaaaagg

SEQ ID NO: 287427 - DNA, 20 bp, synthetic construct
  source 1..20: mol_type = other DNA
gaagacagagagacaaaaag

SEQ ID NO: 287428 - DNA, 20 bp, synthetic construct
  source 1..20: mol_type = other DNA
ggaagacagagagacaaaaa

SEQ ID NO: 287429 - DNA, 20 bp, synthetic construct
  source 1..20: mol_type = other DNA
aggaagacagagagacaaaa

SEQ ID NO: 287430 - DNA, 20 bp, synthetic construct
  source 1..20: mol_type = other DNA
gaggaagacagagagacaaa

SEQ ID NO: 287431 - DNA, 20 bp, synthetic construct
  source 1..20: mol_type = other DNA
agaggaagacagagagacaa

SEQ ID NO: 287432 - DNA, 20 bp, synthetic construct
  source 1..20: mol_type = other DNA
gagaggaagacagagagaca

SEQ ID NO: 287433 - DNA, 20 bp, synthetic construct
  source 1..20: mol_type = other DNA
agagaggaagacagagagac

SEQ ID NO: 287434 - DNA, 20 bp, synthetic construct
  source 1..20: mol_type = other DNA
gagagaggaagacagagaga

SEQ ID NO: 287435 - DNA, 20 bp, synthetic construct
  source 1..20: mol_type = other DNA
agagagaggaagacagagag

SEQ ID NO: 287436 - DNA, 20 bp, synthetic construct
  source 1..20: mol_type = other DNA
gagagagaggaagacagaga

SEQ ID NO: 287437 - DNA, 20 bp, synthetic construct
  source 1..20: mol_type = other DNA
agagagagaggaagacagag

SEQ ID NO: 287438 - DNA, 20 bp, synthetic construct
  source 1..20: mol_type = other DNA
cagagagagaggaagacaga

SEQ ID NO: 287439 - DNA, 20 bp, synthetic construct
  source 1..20: mol_type = other DNA
gcagagagagaggaagacag

SEQ ID NO: 287440 - DNA, 20 bp, synthetic construct
  source 1..20: mol_type = other DNA
ggcagagagagaggaagaca

SEQ ID NO: 287441 - DNA, 20 bp, synthetic construct
  source 1..20: mol_type = other DNA
aggcagagagagaggaagac

SEQ ID NO: 287442 - DNA, 20 bp, synthetic construct
  source 1..20: mol_type = other DNA
aaggcagagagagaggaaga

SEQ ID NO: 287443 - DNA, 20 bp, synthetic construct
  source 1..20: mol_type = other DNA
aaaggcagagagagaggaag

SEQ ID NO: 287444 - DNA, 20 bp, synthetic construct
  source 1..20: mol_type = other DNA
gaaaggcagagagagaggaa

SEQ ID NO: 287445 - DNA, 20 bp, synthetic construct
  source 1..20: mol_type = other DNA
ggaaaggcagagagagagga

SEQ ID NO: 287446 - DNA, 20 bp, synthetic construct
  source 1..20: mol_type = other DNA
aggaaaggcagagagagagg

SEQ ID NO: 287447 - DNA, 20 bp, synthetic construct
  source 1..20: mol_type = other DNA
gaggaaaggcagagagagag

SEQ ID NO: 287448 - DNA, 20 bp, synthetic construct
  source 1..20: mol_type = other DNA
agaggaaaggcagagagaga

SEQ ID NO: 287449 - DNA, 20 bp, synthetic construct
  source 1..20: mol_type = other DNA
aagaggaaaggcagagagag

SEQ ID NO: 287450 - DNA, 20 bp, synthetic construct
  source 1..20: mol_type = other DNA
gaagaggaaaggcagagaga

SEQ ID NO: 287451 - DNA, 20 bp, synthetic construct
  source 1..20: mol_type = other DNA
agaagaggaaaggcagagag

SEQ ID NO: 287452 - DNA, 20 bp, synthetic construct
  source 1..20: mol_type = other DNA
gagaagaggaaaggcagaga

SEQ ID NO: 287453 - DNA, 20 bp, synthetic construct
  source 1..20: mol_type = other DNA
agagaagaggaaaggcagag

SEQ ID NO: 287454 - DNA, 20 bp, synthetic construct
  source 1..20: mol_type = other DNA
gagagaagaggaaaggcaga

SEQ ID NO: 287455 - DNA, 20 bp, synthetic construct
  source 1..20: mol_type = other DNA
agagagaagaggaaaggcag

SEQ ID NO: 287456 - DNA, 20 bp, synthetic construct
  source 1..20: mol_type = other DNA
gagagagaagaggaaaggca

SEQ ID NO: 287457 - DNA, 20 bp, synthetic construct
  source 1..20: mol_type = other DNA
ggagagagaagaggaaaggc

SEQ ID NO: 287458 - DNA, 20 bp, synthetic construct
  source 1..20: mol_type = other DNA
aggagagagaagaggaaagg

SEQ ID NO: 287459 - DNA, 20 bp, synthetic construct
  source 1..20: mol_type = other DNA
gaggagagagaagaggaaag

SEQ ID NO: 287460 - DNA, 20 bp, synthetic construct
  source 1..20: mol_type = other DNA
ggaggagagagaagaggaaa

SEQ ID NO: 287461 - DNA, 20 bp, synthetic construct
  source 1..20: mol_type = other DNA
aggaggagagagaagaggaa

SEQ ID NO: 287462 - DNA, 20 bp, synthetic construct
  source 1..20: mol_type = other DNA
gaggaggagagagaagagga

SEQ ID NO: 287463 - DNA, 20 bp, synthetic construct
  source 1..20: mol_type = other DNA
agaggaggagagagaagagg

SEQ ID NO: 287464 - DNA, 20 bp, synthetic construct
  source 1..20: mol_type = other DNA
gagaggaggagagagaagag

SEQ ID NO: 287465 - DNA, 20 bp, synthetic construct
  source 1..20: mol_type = other DNA
agagaggaggagagagaaga

SEQ ID NO: 287466 - DNA, 20 bp, synthetic construct
  source 1..20: mol_type = other DNA
gagagaggaggagagagaag

SEQ ID NO: 287467 - DNA, 20 bp, synthetic construct
  source 1..20: mol_type = other DNA
tgagagaggaggagagagaa

SEQ ID NO: 287468 - DNA, 20 bp, synthetic construct
  source 1..20: mol_type = other DNA
atgagagaggaggagagaga

SEQ ID NO: 287469 - DNA, 20 bp, synthetic construct
  source 1..20: mol_type = other DNA
gatgagagaggaggagagag

SEQ ID NO: 287470 - DNA, 20 bp, synthetic construct
  source 1..20: mol_type = other DNA
agatgagagaggaggagaga

SEQ ID NO: 287471 - DNA, 20 bp, synthetic construct
  source 1..20: mol_type = other DNA
gagatgagagaggaggagag

SEQ ID NO: 287472 - DNA, 20 bp, synthetic construct
  source 1..20: mol_type = other DNA
ggagatgagagaggaggaga

SEQ ID NO: 287473 - DNA, 20 bp, synthetic construct
  source 1..20: mol_type = other DNA
tggagatgagagaggaggag

SEQ ID NO: 287474 - DNA, 20 bp, synthetic construct
  source 1..20: mol_type = other DNA
ctggagatgagagaggagga

SEQ ID NO: 287475 - DNA, 20 bp, synthetic construct
  source 1..20: mol_type = other DNA
cctggagatgagagaggagg

SEQ ID NO: 287476 - DNA, 20 bp, synthetic construct
  source 1..20: mol_type = other DNA
acctggagatgagagaggag

SEQ ID NO: 287477 - DNA, 20 bp, synthetic construct
  source 1..20: mol_type = other DNA
cacctggagatgagagagga

SEQ ID NO: 287478 - DNA, 20 bp, synthetic construct
  source 1..20: mol_type = other DNA
gcacctggagatgagagagg

SEQ ID NO: 287479 - DNA, 20 bp, synthetic construct
  source 1..20: mol_type = other DNA
tgcacctggagatgagagag

SEQ ID NO: 287480 - DNA, 20 bp, synthetic construct
  source 1..20: mol_type = other DNA
ttgcacctggagatgagaga

SEQ ID NO: 287481 - DNA, 20 bp, synthetic construct
  source 1..20: mol_type = other DNA
tttgcacctggagatgagag

SEQ ID NO: 287482 - DNA, 20 bp, synthetic construct
  source 1..20: mol_type = other DNA
atttgcacctggagatgaga

SEQ ID NO: 287483 - DNA, 20 bp, synthetic construct
  source 1..20: mol_type = other DNA
tatttgcacctggagatgag

SEQ ID NO: 287484 - DNA, 20 bp, synthetic construct
  source 1..20: mol_type = other DNA
ctatttgcacctggagatga

SEQ ID NO: 287485 - DNA, 20 bp, synthetic construct
  source 1..20: mol_type = other DNA
actatttgcacctggagatg

SEQ ID NO: 287486 - DNA, 20 bp, synthetic construct
  source 1..20: mol_type = other DNA
gactatttgcacctggagat

SEQ ID NO: 287487 - DNA, 20 bp, synthetic construct
  source 1..20: mol_type = other DNA
agactatttgcacctggaga

SEQ ID NO: 287488 - DNA, 20 bp, synthetic construct
  source 1..20: mol_type = other DNA
tagactatttgcacctggag

SEQ ID NO: 287489 - DNA, 20 bp, synthetic construct
  source 1..20: mol_type = other DNA
gtagactatttgcacctgga

SEQ ID NO: 287490 - DNA, 20 bp, synthetic construct
  source 1..20: mol_type = other DNA
tgtagactatttgcacctgg

SEQ ID NO: 287491 - DNA, 20 bp, synthetic construct
  source 1..20: mol_type = other DNA
ttgtagactatttgcacctg

SEQ ID NO: 287492 - DNA, 20 bp, synthetic construct
  source 1..20: mol_type = other DNA
tttgtagactatttgcacct

SEQ ID NO: 287493 - DNA, 20 bp, synthetic construct
  source 1..20: mol_type = other DNA
gtttgtagactatttgcacc

SEQ ID NO: 287494 - DNA, 20 bp, synthetic construct
  source 1..20: mol_type = other DNA
ggtttgtagactatttgcac

SEQ ID NO: 287495 - DNA, 20 bp, synthetic construct
  source 1..20: mol_type = other DNA
tggtttgtagactatttgca

SEQ ID NO: 287496 - DNA, 20 bp, synthetic construct
  source 1..20: mol_type = other DNA
ctggtttgtagactatttgc

SEQ ID NO: 287497 - DNA, 20 bp, synthetic construct
  source 1..20: mol_type = other DNA
actggtttgtagactatttg

SEQ ID NO: 287498 - DNA, 20 bp, synthetic construct
  source 1..20: mol_type = other DNA
aactggtttgtagactattt

SEQ ID NO: 287499 - DNA, 20 bp, synthetic construct
  source 1..20: mol_type = other DNA
caactggtttgtagactatt

SEQ ID NO: 287500 - DNA, 20 bp, synthetic construct
  source 1..20: mol_type = other DNA
tcaactggtttgtagactat

SEQ ID NO: 287501 - DNA, 20 bp, synthetic construct
  source 1..20: mol_type = other DNA
gtcaactggtttgtagacta

SEQ ID NO: 287502 - DNA, 20 bp, synthetic construct
  source 1..20: mol_type = other DNA
ggtcaactggtttgtagact

SEQ ID NO: 287503 - DNA, 20 bp, synthetic construct
  source 1..20: mol_type = other DNA
aggtcaactggtttgtagac

SEQ ID NO: 287504 - DNA, 20 bp, synthetic construct
  source 1..20: mol_type = other DNA
caggtcaactggtttgtaga

SEQ ID NO: 287505 - DNA, 20 bp, synthetic construct
  source 1..20: mol_type = other DNA
tcaggtcaactggtttgtag

SEQ ID NO: 287506 - DNA, 20 bp, synthetic construct
  source 1..20: mol_type = other DNA
ctcaggtcaactggtttgta

SEQ ID NO: 287507 - DNA, 20 bp, synthetic construct
  source 1..20: mol_type = other DNA
gctcaggtcaactggtttgt

SEQ ID NO: 287508 - DNA, 20 bp, synthetic construct
  source 1..20: mol_type = other DNA
tgctcaggtcaactggtttg

SEQ ID NO: 287509 - DNA, 20 bp, synthetic construct
  source 1..20: mol_type = other DNA
ttgctcaggtcaactggttt

SEQ ID NO: 287510 - DNA, 20 bp, synthetic construct
  source 1..20: mol_type = other DNA
cttgctcaggtcaactggtt

SEQ ID NO: 287511 - DNA, 20 bp, synthetic construct
  source 1..20: mol_type = other DNA
ccttgctcaggtcaactggt

SEQ ID NO: 287512 - DNA, 20 bp, synthetic construct
  source 1..20: mol_type = other DNA
accttgctcaggtcaactgg

SEQ ID NO: 287513 - DNA, 20 bp, synthetic construct
  source 1..20: mol_type = other DNA
caccttgctcaggtcaactg

SEQ ID NO: 287514 - DNA, 20 bp, synthetic construct
  source 1..20: mol_type = other DNA
tcaccttgctcaggtcaact

SEQ ID NO: 287515 - DNA, 20 bp, synthetic construct
  source 1..20: mol_type = other DNA
gtcaccttgctcaggtcaac

SEQ ID NO: 287516 - DNA, 20 bp, synthetic construct
  source 1..20: mol_type = other DNA
ggtcaccttgctcaggtcaa

SEQ ID NO: 287517 - DNA, 20 bp, synthetic construct
  source 1..20: mol_type = other DNA
aggtcaccttgctcaggtca

SEQ ID NO: 287518 - DNA, 20 bp, synthetic construct
  source 1..20: mol_type = other DNA
gaggtcaccttgctcaggtc

SEQ ID NO: 287519 - DNA, 20 bp, synthetic construct
  source 1..20: mol_type = other DNA
ggaggtcaccttgctcaggt

SEQ ID NO: 287520 - DNA, 20 bp, synthetic construct
  source 1..20: mol_type = other DNA
tggaggtcaccttgctcagg

SEQ ID NO: 287521 - DNA, 20 bp, synthetic construct
  source 1..20: mol_type = other DNA
ttggaggtcaccttgctcag

SEQ ID NO: 287522 - DNA, 20 bp, synthetic construct
  source 1..20: mol_type = other DNA
cttggaggtcaccttgctca

SEQ ID NO: 287523 - DNA, 20 bp, synthetic construct
  source 1..20: mol_type = other DNA
acttggaggtcaccttgctc

SEQ ID NO: 287524 - DNA, 20 bp, synthetic construct
  source 1..20: mol_type = other DNA
cacttggaggtcaccttgct

SEQ ID NO: 287525 - DNA, 20 bp, synthetic construct
  source 1..20: mol_type = other DNA
acacttggaggtcaccttgc

SEQ ID NO: 287526 - DNA, 20 bp, synthetic construct
  source 1..20: mol_type = other DNA
cacacttggaggtcaccttg

SEQ ID NO: 287527 - DNA, 20 bp, synthetic construct
  source 1..20: mol_type = other DNA
ccacacttggaggtcacctt

SEQ ID NO: 287528 - DNA, 20 bp, synthetic construct
  source 1..20: mol_type = other DNA
gccacacttggaggtcacct

SEQ ID NO: 287529 - DNA, 20 bp, synthetic construct
  source 1..20: mol_type = other DNA
agccacacttggaggtcacc

SEQ ID NO: 287530 - DNA, 20 bp, synthetic construct
  source 1..20: mol_type = other DNA
gagccacacttggaggtcac

SEQ ID NO: 287531 - DNA, 20 bp, synthetic construct
  source 1..20: mol_type = other DNA
tgagccacacttggaggtca

SEQ ID NO: 287532 - DNA, 20 bp, synthetic construct
  source 1..20: mol_type = other DNA
atgagccacacttggaggtc

SEQ ID NO: 287533 - DNA, 20 bp, synthetic construct
  source 1..20: mol_type = other DNA
aatgagccacacttggaggt

SEQ ID NO: 287534 - DNA, 20 bp, synthetic construct
  source 1..20: mol_type = other DNA
taatgagccacacttggagg

SEQ ID NO: 287535 - DNA, 20 bp, synthetic construct
  source 1..20: mol_type = other DNA
ctaatgagccacacttggag

SEQ ID NO: 287536 - DNA, 20 bp, synthetic construct
  source 1..20: mol_type = other DNA
cctaatgagccacacttgga

SEQ ID NO: 287537 - DNA, 20 bp, synthetic construct
  source 1..20: mol_type = other DNA
gcctaatgagccacacttgg

SEQ ID NO: 287538 - DNA, 20 bp, synthetic construct
  source 1..20: mol_type = other DNA
tgcctaatgagccacacttg

SEQ ID NO: 287539 - DNA, 20 bp, synthetic construct
  source 1..20: mol_type = other DNA
ttgcctaatgagccacactt

SEQ ID NO: 287540 - DNA, 20 bp, synthetic construct
  source 1..20: mol_type = other DNA
gttgcctaatgagccacact

SEQ ID NO: 287541 - DNA, 20 bp, synthetic construct
  source 1..20: mol_type = other DNA
tgttgcctaatgagccacac

SEQ ID NO: 287542 - DNA, 20 bp, synthetic construct
  source 1..20: mol_type = other DNA
atgttgcctaatgagccaca

SEQ ID NO: 287543 - DNA, 20 bp, synthetic construct
  source 1..20: mol_type = other DNA
gatgttgcctaatgagccac

SEQ ID NO: 287544 - DNA, 20 bp, synthetic construct
  source 1..20: mol_type = other DNA
ggatgttgcctaatgagcca

SEQ ID NO: 287545 - DNA, 20 bp, synthetic construct
  source 1..20: mol_type = other DNA
tggatgttgcctaatgagcc

SEQ ID NO: 287546 - DNA, 20 bp, synthetic construct
  source 1..20: mol_type = other DNA
atggatgttgcctaatgagc

SEQ ID NO: 287547 - DNA, 20 bp, synthetic construct
  source 1..20: mol_type = other DNA
gatggatgttgcctaatgag

SEQ ID NO: 287548 - DNA, 20 bp, synthetic construct
  source 1..20: mol_type = other DNA
tgatggatgttgcctaatga

SEQ ID NO: 287549 - DNA, 20 bp, synthetic construct
  source 1..20: mol_type = other DNA
atgatggatgttgcctaatg

SEQ ID NO: 287550 - DNA, 20 bp, synthetic construct
  source 1..20: mol_type = other DNA
tatgatggatgttgcctaat

SEQ ID NO: 287551 - DNA, 20 bp, synthetic construct
  source 1..20: mol_type = other DNA
ttatgatggatgttgcctaa

SEQ ID NO: 287552 - DNA, 20 bp, synthetic construct
  source 1..20: mol_type = other DNA
tttatgatggatgttgccta

SEQ ID NO: 287553 - DNA, 20 bp, synthetic construct
  source 1..20: mol_type = other DNA
gtttatgatggatgttgcct

SEQ ID NO: 287554 - DNA, 20 bp, synthetic construct
  source 1..20: mol_type = other DNA
ggtttatgatggatgttgcc

SEQ ID NO: 287555 - DNA, 20 bp, synthetic construct
  source 1..20: mol_type = other DNA
tggtttatgatggatgttgc

SEQ ID NO: 287556 - DNA, 20 bp, synthetic construct
  source 1..20: mol_type = other DNA
ctggtttatgatggatgttg

SEQ ID NO: 287557 - DNA, 20 bp, synthetic construct
  source 1..20: mol_type = other DNA
cctggtttatgatggatgtt

SEQ ID NO: 287558 - DNA, 20 bp, synthetic construct
  source 1..20: mol_type = other DNA
acctggtttatgatggatgt

SEQ ID NO: 287559 - DNA, 20 bp, synthetic construct
  source 1..20: mol_type = other DNA
tacctggtttatgatggatg

SEQ ID NO: 287560 - DNA, 20 bp, synthetic construct
  source 1..20: mol_type = other DNA
ctacctggtttatgatggat

SEQ ID NO: 287561 - DNA, 20 bp, synthetic construct
  source 1..20: mol_type = other DNA
gctacctggtttatgatgga

SEQ ID NO: 287562 - DNA, 20 bp, synthetic construct
  source 1..20: mol_type = other DNA
ggctacctggtttatgatgg

SEQ ID NO: 287563 - DNA, 20 bp, synthetic construct
  source 1..20: mol_type = other DNA
gggctacctggtttatgatg

SEQ ID NO: 287564 - DNA, 20 bp, synthetic construct
  source 1..20: mol_type = other DNA
agggctacctggtttatgat

SEQ ID NO: 287565 - DNA, 20 bp, synthetic construct
  source 1..20: mol_type = other DNA
cagggctacctggtttatga

SEQ ID NO: 287566 - DNA, 20 bp, synthetic construct
  source 1..20: mol_type = other DNA
acagggctacctggtttatg

SEQ ID NO: 287567 - DNA, 20 bp, synthetic construct
  source 1..20: mol_type = other DNA
cacagggctacctggtttat

SEQ ID NO: 287568 - DNA, 20 bp, synthetic construct
  source 1..20: mol_type = other DNA
ccacagggctacctggttta

SEQ ID NO: 287569 - DNA, 20 bp, synthetic construct
  source 1..20: mol_type = other DNA
tccacagggctacctggttt

SEQ ID NO: 287570 - DNA, 20 bp, synthetic construct
  source 1..20: mol_type = other DNA
ttccacagggctacctggtt

SEQ ID NO: 287571 - DNA, 20 bp, synthetic construct
  source 1..20: mol_type = other DNA
cttccacagggctacctggt

SEQ ID NO: 287572 - DNA, 20 bp, synthetic construct
  source 1..20: mol_type = other DNA
ccttccacagggctacctgg

SEQ ID NO: 287573 - DNA, 20 bp, synthetic construct
  source 1..20: mol_type = other DNA
accttccacagggctacctg

SEQ ID NO: 287574 - DNA, 20 bp, synthetic construct
  source 1..20: mol_type = other DNA
caccttccacagggctacct

SEQ ID NO: 287575 - DNA, 20 bp, synthetic construct
  source 1..20: mol_type = other DNA
tcaccttccacagggctacc

SEQ ID NO: 287576 - DNA, 20 bp, synthetic construct
  source 1..20: mol_type = other DNA
ctcaccttccacagggctac

SEQ ID NO: 287577 - DNA, 20 bp, synthetic construct
  source 1..20: mol_type = other DNA
cctcaccttccacagggcta

SEQ ID NO: 287578 - DNA, 20 bp, synthetic construct
  source 1..20: mol_type = other DNA
ccctcaccttccacagggct

SEQ ID NO: 287579 - DNA, 20 bp, synthetic construct
  source 1..20: mol_type = other DNA
accctcaccttccacagggc

SEQ ID NO: 287580 - DNA, 20 bp, synthetic construct
  source 1..20: mol_type = other DNA
aaccctcaccttccacaggg

SEQ ID NO: 287581 - DNA, 20 bp, synthetic construct
  source 1..20: mol_type = other DNA
caaccctcaccttccacagg

SEQ ID NO: 287582 - DNA, 20 bp, synthetic construct
  source 1..20: mol_type = other DNA
ccaaccctcaccttccacag

SEQ ID NO: 287583 - DNA, 20 bp, synthetic construct
  source 1..20: mol_type = other DNA
cccaaccctcaccttccaca

SEQ ID NO: 287584 - DNA, 20 bp, synthetic construct
  source 1..20: mol_type = other DNA
tcccaaccctcaccttccac

SEQ ID NO: 287585 - DNA, 20 bp, synthetic construct
  source 1..20: mol_type = other DNA
gtcccaaccctcaccttcca

SEQ ID NO: 287586 - DNA, 20 bp, synthetic construct
  source 1..20: mol_type = other DNA
cgtcccaaccctcaccttcc

SEQ ID NO: 287587 - DNA, 20 bp, synthetic construct
  source 1..20: mol_type = other DNA
ccgtcccaaccctcaccttc

SEQ ID NO: 287588 - DNA, 20 bp, synthetic construct
  source 1..20: mol_type = other DNA
cccgtcccaaccctcacctt

SEQ ID NO: 287589 - DNA, 20 bp, synthetic construct
  source 1..20: mol_type = other DNA
tcccgtcccaaccctcacct

SEQ ID NO: 287590 - DNA, 20 bp, synthetic construct
  source 1..20: mol_type = other DNA
ctcccgtcccaaccctcacc

SEQ ID NO: 287591 - DNA, 20 bp, synthetic construct
  source 1..20: mol_type = other DNA
cctcccgtcccaaccctcac

SEQ ID NO: 287592 - DNA, 20 bp, synthetic construct
  source 1..20: mol_type = other DNA
ccctcccgtcccaaccctca

SEQ ID NO: 287593 - DNA, 20 bp, synthetic construct
  source 1..20: mol_type = other DNA
accctcccgtcccaaccctc

SEQ ID NO: 287594 - DNA, 20 bp, synthetic construct
  source 1..20: mol_type = other DNA
caccctcccgtcccaaccct

SEQ ID NO: 287595 - DNA, 20 bp, synthetic construct
  source 1..20: mol_type = other DNA
gcaccctcccgtcccaaccc

SEQ ID NO: 287596 - DNA, 20 bp, synthetic construct
  source 1..20: mol_type = other DNA
tgcaccctcccgtcccaacc

SEQ ID NO: 287597 - DNA, 20 bp, synthetic construct
  source 1..20: mol_type = other DNA
ctgcaccctcccgtcccaac

SEQ ID NO: 287598 - DNA, 20 bp, synthetic construct
  source 1..20: mol_type = other DNA
cctgcaccctcccgtcccaa

SEQ ID NO: 287599 - DNA, 20 bp, synthetic construct
  source 1..20: mol_type = other DNA
ccctgcaccctcccgtccca

SEQ ID NO: 287600 - DNA, 20 bp, synthetic construct
  source 1..20: mol_type = other DNA
cccctgcaccctcccgtccc

SEQ ID NO: 287601 - DNA, 20 bp, synthetic construct
  source 1..20: mol_type = other DNA
ccccctgcaccctcccgtcc

SEQ ID NO: 287602 - DNA, 20 bp, synthetic construct
  source 1..20: mol_type = other DNA
accccctgcaccctcccgtc

SEQ ID NO: 287603 - DNA, 20 bp, synthetic construct
  source 1..20: mol_type = other DNA
caccccctgcaccctcccgt

SEQ ID NO: 287604 - DNA, 20 bp, synthetic construct
  source 1..20: mol_type = other DNA
ccaccccctgcaccctcccg

SEQ ID NO: 287605 - DNA, 20 bp, synthetic construct
  source 1..20: mol_type = other DNA
tccaccccctgcaccctccc

SEQ ID NO: 287606 - DNA, 20 bp, synthetic construct
  source 1..20: mol_type = other DNA
ctccaccccctgcaccctcc

SEQ ID NO: 287607 - DNA, 20 bp, synthetic construct
  source 1..20: mol_type = other DNA
cctccaccccctgcaccctc

SEQ ID NO: 287608 - DNA, 20 bp, synthetic construct
  source 1..20: mol_type = other DNA
tcctccaccccctgcaccct

SEQ ID NO: 287609 - DNA, 20 bp, synthetic construct
  source 1..20: mol_type = other DNA
ctcctccaccccctgcaccc

SEQ ID NO: 287610 - DNA, 20 bp, synthetic construct
  source 1..20: mol_type = other DNA
actcctccaccccctgcacc

SEQ ID NO: 287611 - DNA, 20 bp, synthetic construct
  source 1..20: mol_type = other DNA
gactcctccaccccctgcac

SEQ ID NO: 287612 - DNA, 20 bp, synthetic construct
  source 1..20: mol_type = other DNA
ggactcctccaccccctgca

SEQ ID NO: 287613 - DNA, 20 bp, synthetic construct
  source 1..20: mol_type = other DNA
aggactcctccaccccctgc

SEQ ID NO: 287614 - DNA, 20 bp, synthetic construct
  source 1..20: mol_type = other DNA
caggactcctccaccccctg

SEQ ID NO: 287615 - DNA, 20 bp, synthetic construct
  source 1..20: mol_type = other DNA
ccaggactcctccaccccct

SEQ ID NO: 287616 - DNA, 20 bp, synthetic construct
  source 1..20: mol_type = other DNA
accaggactcctccaccccc

SEQ ID NO: 287617 - DNA, 20 bp, synthetic construct
  source 1..20: mol_type = other DNA
caccaggactcctccacccc

SEQ ID NO: 287618 - DNA, 20 bp, synthetic construct
  source 1..20: mol_type = other DNA
tcaccaggactcctccaccc

SEQ ID NO: 287619 - DNA, 20 bp, synthetic construct
  source 1..20: mol_type = other DNA
ctcaccaggactcctccacc

SEQ ID NO: 287620 - DNA, 20 bp, synthetic construct
  source 1..20: mol_type = other DNA
cctcaccaggactcctccac

SEQ ID NO: 287621 - DNA, 20 bp, synthetic construct
  source 1..20: mol_type = other DNA
gcctcaccaggactcctcca

SEQ ID NO: 287622 - DNA, 20 bp, synthetic construct
  source 1..20: mol_type = other DNA
agcctcaccaggactcctcc

SEQ ID NO: 287623 - DNA, 20 bp, synthetic construct
  source 1..20: mol_type = other DNA
cagcctcaccaggactcctc

SEQ ID NO: 287624 - DNA, 20 bp, synthetic construct
  source 1..20: mol_type = other DNA
ccagcctcaccaggactcct

SEQ ID NO: 287625 - DNA, 20 bp, synthetic construct
  source 1..20: mol_type = other DNA
tccagcctcaccaggactcc

SEQ ID NO: 287626 - DNA, 20 bp, synthetic construct
  source 1..20: mol_type = other DNA
ttccagcctcaccaggactc

SEQ ID NO: 287627 - DNA, 20 bp, synthetic construct
  source 1..20: mol_type = other DNA
gttccagcctcaccaggact

SEQ ID NO: 287628 - DNA, 20 bp, synthetic construct
  source 1..20: mol_type = other DNA
agttccagcctcaccaggac

SEQ ID NO: 287629 - DNA, 20 bp, synthetic construct
  source 1..20: mol_type = other DNA
cagttccagcctcaccagga

SEQ ID NO: 287630 - DNA, 20 bp, synthetic construct
  source 1..20: mol_type = other DNA
gcagttccagcctcaccagg

SEQ ID NO: 287631 - DNA, 20 bp, synthetic construct
  source 1..20: mol_type = other DNA
agcagttccagcctcaccag

SEQ ID NO: 287632 - DNA, 20 bp, synthetic construct
  source 1..20: mol_type = other DNA
gagcagttccagcctcacca

SEQ ID NO: 287633 - DNA, 20 bp, synthetic construct
  source 1..20: mol_type = other DNA
ggagcagttccagcctcacc

SEQ ID NO: 287634 - DNA, 20 bp, synthetic construct
  source 1..20: mol_type = other DNA
tggagcagttccagcctcac

SEQ ID NO: 287635 - DNA, 20 bp, synthetic construct
  source 1..20: mol_type = other DNA
ctggagcagttccagcctca

SEQ ID NO: 287636 - DNA, 20 bp, synthetic construct
  source 1..20: mol_type = other DNA
tctggagcagttccagcctc

SEQ ID NO: 287637 - DNA, 20 bp, synthetic construct
  source 1..20: mol_type = other DNA
gtctggagcagttccagcct

SEQ ID NO: 287638 - DNA, 20 bp, synthetic construct
  source 1..20: mol_type = other DNA
agtctggagcagttccagcc

SEQ ID NO: 287639 - DNA, 20 bp, synthetic construct
  source 1..20: mol_type = other DNA
aagtctggagcagttccagc

SEQ ID NO: 287640 - DNA, 20 bp, synthetic construct
  source 1..20: mol_type = other DNA
gaagtctggagcagttccag

SEQ ID NO: 287641 - DNA, 20 bp, synthetic construct
  source 1..20: mol_type = other DNA
tgaagtctggagcagttcca

SEQ ID NO: 287642 - DNA, 20 bp, synthetic construct
  source 1..20: mol_type = other DNA
ctgaagtctggagcagttcc

SEQ ID NO: 287643 - DNA, 20 bp, synthetic construct
  source 1..20: mol_type = other DNA
tctgaagtctggagcagttc

SEQ ID NO: 287644 - DNA, 20 bp, synthetic construct
  source 1..20: mol_type = other DNA
ttctgaagtctggagcagtt

SEQ ID NO: 287645 - DNA, 20 bp, synthetic construct
  source 1..20: mol_type = other DNA
cttctgaagtctggagcagt

SEQ ID NO: 287646 - DNA, 20 bp, synthetic construct
  source 1..20: mol_type = other DNA
ccttctgaagtctggagcag

SEQ ID NO: 287647 - DNA, 20 bp, synthetic construct
  source 1..20: mol_type = other DNA
cccttctgaagtctggagca

SEQ ID NO: 287648 - DNA, 20 bp, synthetic construct
  source 1..20: mol_type = other DNA
ccccttctgaagtctggagc

SEQ ID NO: 287649 - DNA, 20 bp, synthetic construct
  source 1..20: mol_type = other DNA
gccccttctgaagtctggag

SEQ ID NO: 287650 - DNA, 20 bp, synthetic construct
  source 1..20: mol_type = other DNA
agccccttctgaagtctgga

SEQ ID NO: 287651 - DNA, 20 bp, synthetic construct
  source 1..20: mol_type = other DNA
cagccccttctgaagtctgg

SEQ ID NO: 287652 - DNA, 20 bp, synthetic construct
  source 1..20: mol_type = other DNA
ccagccccttctgaagtctg

SEQ ID NO: 287653 - DNA, 20 bp, synthetic construct
  source 1..20: mol_type = other DNA
tccagccccttctgaagtct

SEQ ID NO: 287654 - DNA, 20 bp, synthetic construct
  source 1..20: mol_type = other DNA
ttccagccccttctgaagtc

SEQ ID NO: 287655 - DNA, 20 bp, synthetic construct
  source 1..20: mol_type = other DNA
tttccagccccttctgaagt

SEQ ID NO: 287656 - DNA, 20 bp, synthetic construct
  source 1..20: mol_type = other DNA
ctttccagccccttctgaag

SEQ ID NO: 287657 - DNA, 20 bp, synthetic construct
  source 1..20: mol_type = other DNA
cctttccagccccttctgaa

SEQ ID NO: 287658 - DNA, 20 bp, synthetic construct
  source 1..20: mol_type = other DNA
tcctttccagccccttctga

SEQ ID NO: 287659 - DNA, 20 bp, synthetic construct
  source 1..20: mol_type = other DNA
atcctttccagccccttctg

SEQ ID NO: 287660 - DNA, 20 bp, synthetic construct
  source 1..20: mol_type = other DNA
tatcctttccagccccttct

SEQ ID NO: 287661 - DNA, 20 bp, synthetic construct
  source 1..20: mol_type = other DNA
atatcctttccagccccttc

SEQ ID NO: 287662 - DNA, 20 bp, synthetic construct
  source 1..20: mol_type = other DNA
aatatcctttccagcccctt

SEQ ID NO: 287663 - DNA, 20 bp, synthetic construct
  source 1..20: mol_type = other DNA
aaatatcctttccagcccct

SEQ ID NO: 287664 - DNA, 20 bp, synthetic construct
  source 1..20: mol_type = other DNA
aaaatatcctttccagcccc

SEQ ID NO: 287665 - DNA, 20 bp, synthetic construct
  source 1..20: mol_type = other DNA
taaaatatcctttccagccc

SEQ ID NO: 287666 - DNA, 20 bp, synthetic construct
  source 1..20: mol_type = other DNA
ctaaaatatcctttccagcc

SEQ ID NO: 287667 - DNA, 20 bp, synthetic construct
  source 1..20: mol_type = other DNA
cctaaaatatcctttccagc

SEQ ID NO: 287668 - DNA, 20 bp, synthetic construct
  source 1..20: mol_type = other DNA
acctaaaatatcctttccag

SEQ ID NO: 287669 - DNA, 20 bp, synthetic construct
  source 1..20: mol_type = other DNA
tacctaaaatatcctttcca

SEQ ID NO: 287670 - DNA, 20 bp, synthetic construct
  source 1..20: mol_type = other DNA
ctacctaaaatatcctttcc

SEQ ID NO: 287671 - DNA, 20 bp, synthetic construct
  source 1..20: mol_type = other DNA
tctacctaaaatatcctttc

SEQ ID NO: 287672 - DNA, 20 bp, synthetic construct
  source 1..20: mol_type = other DNA
gtctacctaaaatatccttt

SEQ ID NO: 287673 - DNA, 20 bp, synthetic construct
  source 1..20: mol_type = other DNA
ggtctacctaaaatatcctt

SEQ ID NO: 287674 - DNA, 20 bp, synthetic construct
  source 1..20: mol_type = other DNA
aggtctacctaaaatatcct

SEQ ID NO: 287675 - DNA, 20 bp, synthetic construct
  source 1..20: mol_type = other DNA
taggtctacctaaaatatcc

SEQ ID NO: 287676 - DNA, 20 bp, synthetic construct
  source 1..20: mol_type = other DNA
gtaggtctacctaaaatatc

SEQ ID NO: 287677 - DNA, 20 bp, synthetic construct
  source 1..20: mol_type = other DNA
tgtaggtctacctaaaatat

SEQ ID NO: 287678 - DNA, 20 bp, synthetic construct
  source 1..20: mol_type = other DNA
atgtaggtctacctaaaata

SEQ ID NO: 287679 - DNA, 20 bp, synthetic construct
  source 1..20: mol_type = other DNA
gatgtaggtctacctaaaat

SEQ ID NO: 287680 - DNA, 20 bp, synthetic construct
  source 1..20: mol_type = other DNA
tgatgtaggtctacctaaaa

SEQ ID NO: 287681 - DNA, 20 bp, synthetic construct
  source 1..20: mol_type = other DNA
ttgatgtaggtctacctaaa

SEQ ID NO: 287682 - DNA, 20 bp, synthetic construct
  source 1..20: mol_type = other DNA
cttgatgtaggtctacctaa

SEQ ID NO: 287683 - DNA, 20 bp, synthetic construct
  source 1..20: mol_type = other DNA
ccttgatgtaggtctaccta

SEQ ID NO: 287684 - DNA, 20 bp, synthetic construct
  source 1..20: mol_type = other DNA
tccttgatgtaggtctacct

SEQ ID NO: 287685 - DNA, 20 bp, synthetic construct
  source 1..20: mol_type = other DNA
ttccttgatgtaggtctacc

SEQ ID NO: 287686 - DNA, 20 bp, synthetic construct
  source 1..20: mol_type = other DNA
tttccttgatgtaggtctac

SEQ ID NO: 287687 - DNA, 20 bp, synthetic construct
  source 1..20: mol_type = other DNA
ctttccttgatgtaggtcta

SEQ ID NO: 287688 - DNA, 20 bp, synthetic construct
  source 1..20: mol_type = other DNA
actttccttgatgtaggtct

SEQ ID NO: 287689 - DNA, 20 bp, synthetic construct
  source 1..20: mol_type = other DNA
cactttccttgatgtaggtc

SEQ ID NO: 287690 - DNA, 20 bp, synthetic construct
  source 1..20: mol_type = other DNA
acactttccttgatgtaggt

SEQ ID NO: 287691 - DNA, 20 bp, synthetic construct
  source 1..20: mol_type = other DNA
aacactttccttgatgtagg

SEQ ID NO: 287692 - DNA, 20 bp, synthetic construct
  source 1..20: mol_type = other DNA
caacactttccttgatgtag

SEQ ID NO: 287693 - DNA, 20 bp, synthetic construct
  source 1..20: mol_type = other DNA
tcaacactttccttgatgta

SEQ ID NO: 287694 - DNA, 20 bp, synthetic construct
  source 1..20: mol_type = other DNA
ctcaacactttccttgatgt

SEQ ID NO: 287695 - DNA, 20 bp, synthetic construct
  source 1..20: mol_type = other DNA
actcaacactttccttgatg

SEQ ID NO: 287696 - DNA, 20 bp, synthetic construct
  source 1..20: mol_type = other DNA
cactcaacactttccttgat

SEQ ID NO: 287697 - DNA, 20 bp, synthetic construct
  source 1..20: mol_type = other DNA
acactcaacactttccttga

SEQ ID NO: 287698 - DNA, 20 bp, synthetic construct
  source 1..20: mol_type = other DNA
cacactcaacactttccttg

SEQ ID NO: 287699 - DNA, 20 bp, synthetic construct
  source 1..20: mol_type = other DNA
tcacactcaacactttcctt

SEQ ID NO: 287700 - DNA, 20 bp, synthetic construct
  source 1..20: mol_type = other DNA
ttcacactcaacactttcct

SEQ ID NO: 287701 - DNA, 20 bp, synthetic construct
  source 1..20: mol_type = other DNA
tttcacactcaacactttcc

SEQ ID NO: 287702 - DNA, 20 bp, synthetic construct
  source 1..20: mol_type = other DNA
gtttcacactcaacactttc

SEQ ID NO: 287703 - DNA, 20 bp, synthetic construct
  source 1..20: mol_type = other DNA
agtttcacactcaacacttt

SEQ ID NO: 287704 - DNA, 20 bp, synthetic construct
  source 1..20: mol_type = other DNA
aagtttcacactcaacactt

SEQ ID NO: 287705 - DNA, 20 bp, synthetic construct
  source 1..20: mol_type = other DNA
caagtttcacactcaacact

SEQ ID NO: 287706 - DNA, 20 bp, synthetic construct
  source 1..20: mol_type = other DNA
gcaagtttcacactcaacac

SEQ ID NO: 287707 - DNA, 20 bp, synthetic construct
  source 1..20: mol_type = other DNA
cgcaagtttcacactcaaca

SEQ ID NO: 287708 - DNA, 20 bp, synthetic construct
  source 1..20: mol_type = other DNA
ccgcaagtttcacactcaac

SEQ ID NO: 287709 - DNA, 20 bp, synthetic construct
  source 1..20: mol_type = other DNA
cccgcaagtttcacactcaa

SEQ ID NO: 287710 - DNA, 20 bp, synthetic construct
  source 1..20: mol_type = other DNA
tcccgcaagtttcacactca

SEQ ID NO: 287711 - DNA, 20 bp, synthetic construct
  source 1..20: mol_type = other DNA
ctcccgcaagtttcacactc

SEQ ID NO: 287712 - DNA, 20 bp, synthetic construct
  source 1..20: mol_type = other DNA
gctcccgcaagtttcacact

SEQ ID NO: 287713 - DNA, 20 bp, synthetic construct
  source 1..20: mol_type = other DNA
ggctcccgcaagtttcacac

SEQ ID NO: 287714 - DNA, 20 bp, synthetic construct
  source 1..20: mol_type = other DNA
gggctcccgcaagtttcaca

SEQ ID NO: 287715 - DNA, 20 bp, synthetic construct
  source 1..20: mol_type = other DNA
tgggctcccgcaagtttcac

SEQ ID NO: 287716 - DNA, 20 bp, synthetic construct
  source 1..20: mol_type = other DNA
ctgggctcccgcaagtttca

SEQ ID NO: 287717 - DNA, 20 bp, synthetic construct
  source 1..20: mol_type = other DNA
cctgggctcccgcaagtttc

SEQ ID NO: 287718 - DNA, 20 bp, synthetic construct
  source 1..20: mol_type = other DNA
tcctgggctcccgcaagttt

SEQ ID NO: 287719 - DNA, 20 bp, synthetic construct
  source 1..20: mol_type = other DNA
ctcctgggctcccgcaagtt

SEQ ID NO: 287720 - DNA, 20 bp, synthetic construct
  source 1..20: mol_type = other DNA
cctcctgggctcccgcaagt

SEQ ID NO: 287721 - DNA, 20 bp, synthetic construct
  source 1..20: mol_type = other DNA
gcctcctgggctcccgcaag

SEQ ID NO: 287722 - DNA, 20 bp, synthetic construct
  source 1..20: mol_type = other DNA
cgcctcctgggctcccgcaa

SEQ ID NO: 287723 - DNA, 20 bp, synthetic construct
  source 1..20: mol_type = other DNA
acgcctcctgggctcccgca

SEQ ID NO: 287724 - DNA, 20 bp, synthetic construct
  source 1..20: mol_type = other DNA
cacgcctcctgggctcccgc

SEQ ID NO: 287725 - DNA, 20 bp, synthetic construct
  source 1..20: mol_type = other DNA
ccacgcctcctgggctcccg

SEQ ID NO: 287726 - DNA, 20 bp, synthetic construct
  source 1..20: mol_type = other DNA
accacgcctcctgggctccc

SEQ ID NO: 287727 - DNA, 20 bp, synthetic construct
  source 1..20: mol_type = other DNA
caccacgcctcctgggctcc

SEQ ID NO: 287728 - DNA, 20 bp, synthetic construct
  source 1..20: mol_type = other DNA
ccaccacgcctcctgggctc

SEQ ID NO: 287729 - DNA, 20 bp, synthetic construct
  source 1..20: mol_type = other DNA
gccaccacgcctcctgggct

SEQ ID NO: 287730 - DNA, 20 bp, synthetic construct
  source 1..20: mol_type = other DNA
agccaccacgcctcctgggc

SEQ ID NO: 287731 - DNA, 20 bp, synthetic construct
  source 1..20: mol_type = other DNA
gagccaccacgcctcctggg

SEQ ID NO: 287732 - DNA, 20 bp, synthetic construct
  source 1..20: mol_type = other DNA
ggagccaccacgcctcctgg

SEQ ID NO: 287733 - DNA, 20 bp, synthetic construct
  source 1..20: mol_type = other DNA
tggagccaccacgcctcctg

SEQ ID NO: 287734 - DNA, 20 bp, synthetic construct
  source 1..20: mol_type = other DNA
ctggagccaccacgcctcct

SEQ ID NO: 287735 - DNA, 20 bp, synthetic construct
  source 1..20: mol_type = other DNA
gctggagccaccacgcctcc

SEQ ID NO: 287736 - DNA, 20 bp, synthetic construct
  source 1..20: mol_type = other DNA
agctggagccaccacgcctc

SEQ ID NO: 287737 - DNA, 20 bp, synthetic construct
  source 1..20: mol_type = other DNA
gagctggagccaccacgcct

SEQ ID NO: 287738 - DNA, 20 bp, synthetic construct
  source 1..20: mol_type = other DNA
cgagctggagccaccacgcc

SEQ ID NO: 287739 - DNA, 20 bp, synthetic construct
  source 1..20: mol_type = other DNA
gcgagctggagccaccacgc

SEQ ID NO: 287740 - DNA, 20 bp, synthetic construct
  source 1..20: mol_type = other DNA
agcgagctggagccaccacg

SEQ ID NO: 287741 - DNA, 20 bp, synthetic construct
  source 1..20: mol_type = other DNA
gagcgagctggagccaccac

SEQ ID NO: 287742 - DNA, 20 bp, synthetic construct
  source 1..20: mol_type = other DNA
ggagcgagctggagccacca

SEQ ID NO: 287743 - DNA, 20 bp, synthetic construct
  source 1..20: mol_type = other DNA
aggagcgagctggagccacc

SEQ ID NO: 287744 - DNA, 20 bp, synthetic construct
  source 1..20: mol_type = other DNA
caggagcgagctggagccac

SEQ ID NO: 287745 - DNA, 20 bp, synthetic construct
  source 1..20: mol_type = other DNA
gcaggagcgagctggagcca

SEQ ID NO: 287746 - DNA, 20 bp, synthetic construct
  source 1..20: mol_type = other DNA
ggcaggagcgagctggagcc

SEQ ID NO: 287747 - DNA, 20 bp, synthetic construct
  source 1..20: mol_type = other DNA
gggcaggagcgagctggagc

SEQ ID NO: 287748 - DNA, 20 bp, synthetic construct
  source 1..20: mol_type = other DNA
tgggcaggagcgagctggag

SEQ ID NO: 287749 - DNA, 20 bp, synthetic construct
  source 1..20: mol_type = other DNA
ctgggcaggagcgagctgga

SEQ ID NO: 287750 - DNA, 20 bp, synthetic construct
  source 1..20: mol_type = other DNA
cctgggcaggagcgagctgg

SEQ ID NO: 287751 - DNA, 20 bp, synthetic construct
  source 1..20: mol_type = other DNA
gcctgggcaggagcgagctg

SEQ ID NO: 287752 - DNA, 20 bp, synthetic construct
  source 1..20: mol_type = other DNA
ggcctgggcaggagcgagct

SEQ ID NO: 287753 - DNA, 20 bp, synthetic construct
  source 1..20: mol_type = other DNA
tggcctgggcaggagcgagc

SEQ ID NO: 287754 - DNA, 20 bp, synthetic construct
  source 1..20: mol_type = other DNA
atggcctgggcaggagcgag

SEQ ID NO: 287755 - DNA, 20 bp, synthetic construct
  source 1..20: mol_type = other DNA
catggcctgggcaggagcga

SEQ ID NO: 287756 - DNA, 20 bp, synthetic construct
  source 1..20: mol_type = other DNA
gcatggcctgggcaggagcg

SEQ ID NO: 287757 - DNA, 20 bp, synthetic construct
  source 1..20: mol_type = other DNA
agcatggcctgggcaggagc

SEQ ID NO: 287758 - DNA, 20 bp, synthetic construct
  source 1..20: mol_type = other DNA
cagcatggcctgggcaggag

SEQ ID NO: 287759 - DNA, 20 bp, synthetic construct
  source 1..20: mol_type = other DNA
gcagcatggcctgggcagga

SEQ ID NO: 287760 - DNA, 20 bp, synthetic construct
  source 1..20: mol_type = other DNA
ggcagcatggcctgggcagg

SEQ ID NO: 287761 - DNA, 20 bp, synthetic construct
  source 1..20: mol_type = other DNA
gggcagcatggcctgggcag

SEQ ID NO: 287762 - DNA, 20 bp, synthetic construct
  source 1..20: mol_type = other DNA
tgggcagcatggcctgggca

SEQ ID NO: 287763 - DNA, 20 bp, synthetic construct
  source 1..20: mol_type = other DNA
ttgggcagcatggcctgggc

SEQ ID NO: 287764 - DNA, 20 bp, synthetic construct
  source 1..20: mol_type = other DNA
cttgggcagcatggcctggg

SEQ ID NO: 287765 - DNA, 20 bp, synthetic construct
  source 1..20: mol_type = other DNA
tcttgggcagcatggcctgg

SEQ ID NO: 287766 - DNA, 20 bp, synthetic construct
  source 1..20: mol_type = other DNA
gtcttgggcagcatggcctg

SEQ ID NO: 287767 - DNA, 20 bp, synthetic construct
  source 1..20: mol_type = other DNA
tgtcttgggcagcatggcct

SEQ ID NO: 287768 - DNA, 20 bp, synthetic construct
  source 1..20: mol_type = other DNA
ttgtcttgggcagcatggcc

SEQ ID NO: 287769 - DNA, 20 bp, synthetic construct
  source 1..20: mol_type = other DNA
cttgtcttgggcagcatggc

SEQ ID NO: 287770 - DNA, 20 bp, synthetic construct
  source 1..20: mol_type = other DNA
ccttgtcttgggcagcatgg

SEQ ID NO: 287771 - DNA, 20 bp, synthetic construct
  source 1..20: mol_type = other DNA
accttgtcttgggcagcatg

SEQ ID NO: 287772 - DNA, 20 bp, synthetic construct
  source 1..20: mol_type = other DNA
caccttgtcttgggcagcat

SEQ ID NO: 287773 - DNA, 20 bp, synthetic construct
  source 1..20: mol_type = other DNA
tcaccttgtcttgggcagca

SEQ ID NO: 287774 - DNA, 20 bp, synthetic construct
  source 1..20: mol_type = other DNA
ctcaccttgtcttgggcagc

SEQ ID NO: 287775 - DNA, 20 bp, synthetic construct
  source 1..20: mol_type = other DNA
cctcaccttgtcttgggcag

SEQ ID NO: 287776 - DNA, 20 bp, synthetic construct
  source 1..20: mol_type = other DNA
gcctcaccttgtcttgggca

SEQ ID NO: 287777 - DNA, 20 bp, synthetic construct
  source 1..20: mol_type = other DNA
cgcctcaccttgtcttgggc

SEQ ID NO: 287778 - DNA, 20 bp, synthetic construct
  source 1..20: mol_type = other DNA
ccgcctcaccttgtcttggg

SEQ ID NO: 287779 - DNA, 20 bp, synthetic construct
  source 1..20: mol_type = other DNA
cccgcctcaccttgtcttgg

SEQ ID NO: 287780 - DNA, 20 bp, synthetic construct
  source 1..20: mol_type = other DNA
tcccgcctcaccttgtcttg

SEQ ID NO: 287781 - DNA, 20 bp, synthetic construct
  source 1..20: mol_type = other DNA
ctcccgcctcaccttgtctt

SEQ ID NO: 287782 - DNA, 20 bp, synthetic construct
  source 1..20: mol_type = other DNA
actcccgcctcaccttgtct

SEQ ID NO: 287783 - DNA, 20 bp, synthetic construct
  source 1..20: mol_type = other DNA
cactcccgcctcaccttgtc

SEQ ID NO: 287784 - DNA, 20 bp, synthetic construct
  source 1..20: mol_type = other DNA
tcactcccgcctcaccttgt

SEQ ID NO: 287785 - DNA, 20 bp, synthetic construct
  source 1..20: mol_type = other DNA
ttcactcccgcctcaccttg

SEQ ID NO: 287786 - DNA, 20 bp, synthetic construct
  source 1..20: mol_type = other DNA
cttcactcccgcctcacctt

SEQ ID NO: 287787 - DNA, 20 bp, synthetic construct
  source 1..20: mol_type = other DNA
acttcactcccgcctcacct

SEQ ID NO: 287788 - DNA, 20 bp, synthetic construct
  source 1..20: mol_type = other DNA
cacttcactcccgcctcacc

SEQ ID NO: 287789 - DNA, 20 bp, synthetic construct
  source 1..20: mol_type = other DNA
tcacttcactcccgcctcac

SEQ ID NO: 287790 - DNA, 20 bp, synthetic construct
  source 1..20: mol_type = other DNA
ttcacttcactcccgcctca

SEQ ID NO: 287791 - DNA, 20 bp, synthetic construct
  source 1..20: mol_type = other DNA
tttcacttcactcccgcctc

SEQ ID NO: 287792 - DNA, 20 bp, synthetic construct
  source 1..20: mol_type = other DNA
atttcacttcactcccgcct

SEQ ID NO: 287793 - DNA, 20 bp, synthetic construct
  source 1..20: mol_type = other DNA
tatttcacttcactcccgcc

SEQ ID NO: 287794 - DNA, 20 bp, synthetic construct
  source 1..20: mol_type = other DNA
ttatttcacttcactcccgc

SEQ ID NO: 287795 - DNA, 20 bp, synthetic construct
  source 1..20: mol_type = other DNA
cttatttcacttcactcccg

SEQ ID NO: 287796 - DNA, 20 bp, synthetic construct
  source 1..20: mol_type = other DNA
ccttatttcacttcactccc

SEQ ID NO: 287797 - DNA, 20 bp, synthetic construct
  source 1..20: mol_type = other DNA
gccttatttcacttcactcc

SEQ ID NO: 287798 - DNA, 20 bp, synthetic construct
  source 1..20: mol_type = other DNA
tgccttatttcacttcactc

SEQ ID NO: 287799 - DNA, 20 bp, synthetic construct
  source 1..20: mol_type = other DNA
ctgccttatttcacttcact

SEQ ID NO: 287800 - DNA, 20 bp, synthetic construct
  source 1..20: mol_type = other DNA
cctgccttatttcacttcac

SEQ ID NO: 287801 - DNA, 20 bp, synthetic construct
  source 1..20: mol_type = other DNA
gcctgccttatttcacttca

SEQ ID NO: 287802 - DNA, 20 bp, synthetic construct
  source 1..20: mol_type = other DNA
tgcctgccttatttcacttc

SEQ ID NO: 287803 - DNA, 20 bp, synthetic construct
  source 1..20: mol_type = other DNA
gtgcctgccttatttcactt

SEQ ID NO: 287804 - DNA, 20 bp, synthetic construct
  source 1..20: mol_type = other DNA
tgtgcctgccttatttcact

SEQ ID NO: 287805 - DNA, 20 bp, synthetic construct
  source 1..20: mol_type = other DNA
ctgtgcctgccttatttcac

SEQ ID NO: 287806 - DNA, 20 bp, synthetic construct
  source 1..20: mol_type = other DNA
tctgtgcctgccttatttca

SEQ ID NO: 287807 - DNA, 20 bp, synthetic construct
  source 1..20: mol_type = other DNA
ttctgtgcctgccttatttc

SEQ ID NO: 287808 - DNA, 20 bp, synthetic construct
  source 1..20: mol_type = other DNA
tttctgtgcctgccttattt

SEQ ID NO: 287809 - DNA, 20 bp, synthetic construct
  source 1..20: mol_type = other DNA
ctttctgtgcctgccttatt

SEQ ID NO: 287810 - DNA, 20 bp, synthetic construct
  source 1..20: mol_type = other DNA
tctttctgtgcctgccttat

SEQ ID NO: 287811 - DNA, 20 bp, synthetic construct
  source 1..20: mol_type = other DNA
ttctttctgtgcctgcctta

SEQ ID NO: 287812 - DNA, 20 bp, synthetic construct
  source 1..20: mol_type = other DNA
tttctttctgtgcctgcctt

SEQ ID NO: 287813 - DNA, 20 bp, synthetic construct
  source 1..20: mol_type = other DNA
ctttctttctgtgcctgcct

SEQ ID NO: 287814 - DNA, 20 bp, synthetic construct
  source 1..20: mol_type = other DNA
gctttctttctgtgcctgcc

SEQ ID NO: 287815 - DNA, 20 bp, synthetic construct
  source 1..20: mol_type = other DNA
tgctttctttctgtgcctgc

SEQ ID NO: 287816 - DNA, 20 bp, synthetic construct
  source 1..20: mol_type = other DNA
gtgctttctttctgtgcctg

SEQ ID NO: 287817 - DNA, 20 bp, synthetic construct
  source 1..20: mol_type = other DNA
tgtgctttctttctgtgcct

SEQ ID NO: 287818 - DNA, 20 bp, synthetic construct
  source 1..20: mol_type = other DNA
atgtgctttctttctgtgcc

SEQ ID NO: 287819 - DNA, 20 bp, synthetic construct
  source 1..20: mol_type = other DNA
tatgtgctttctttctgtgc

SEQ ID NO: 287820 - DNA, 20 bp, synthetic construct
  source 1..20: mol_type = other DNA
atatgtgctttctttctgtg

SEQ ID NO: 287821 - DNA, 20 bp, synthetic construct
  source 1..20: mol_type = other DNA
aatatgtgctttctttctgt

SEQ ID NO: 287822 - DNA, 20 bp, synthetic construct
  source 1..20: mol_type = other DNA
gaatatgtgctttctttctg

SEQ ID NO: 287823 - DNA, 20 bp, synthetic construct
  source 1..20: mol_type = other DNA
agaatatgtgctttctttct

SEQ ID NO: 287824 - DNA, 20 bp, synthetic construct
  source 1..20: mol_type = other DNA
gagaatatgtgctttctttc

SEQ ID NO: 287825 - DNA, 20 bp, synthetic construct
  source 1..20: mol_type = other DNA
cgagaatatgtgctttcttt

SEQ ID NO: 287826 - DNA, 20 bp, synthetic construct
  source 1..20: mol_type = other DNA
ccgagaatatgtgctttctt

SEQ ID NO: 287827 - DNA, 20 bp, synthetic construct
  source 1..20: mol_type = other DNA
gccgagaatatgtgctttct

SEQ ID NO: 287828 - DNA, 20 bp, synthetic construct
  source 1..20: mol_type = other DNA
ggccgagaatatgtgctttc

SEQ ID NO: 287829 - DNA, 20 bp, synthetic construct
  source 1..20: mol_type = other DNA
cggccgagaatatgtgcttt

SEQ ID NO: 287830 - DNA, 20 bp, synthetic construct
  source 1..20: mol_type = other DNA
ccggccgagaatatgtgctt

SEQ ID NO: 287831 - DNA, 20 bp, synthetic construct
  source 1..20: mol_type = other DNA
cccggccgagaatatgtgct

SEQ ID NO: 287832 - DNA, 20 bp, synthetic construct
  source 1..20: mol_type = other DNA
gcccggccgagaatatgtgc

SEQ ID NO: 287833 - DNA, 20 bp, synthetic construct
  source 1..20: mol_type = other DNA
cgcccggccgagaatatgtg

SEQ ID NO: 287834 - DNA, 20 bp, synthetic construct
  source 1..20: mol_type = other DNA
gcgcccggccgagaatatgt

SEQ ID NO: 287835 - DNA, 20 bp, synthetic construct
  source 1..20: mol_type = other DNA
agcgcccggccgagaatatg

SEQ ID NO: 287836 - DNA, 20 bp, synthetic construct
  source 1..20: mol_type = other DNA
cagcgcccggccgagaatat

SEQ ID NO: 287837 - DNA, 20 bp, synthetic construct
  source 1..20: mol_type = other DNA
acagcgcccggccgagaata

SEQ ID NO: 287838 - DNA, 20 bp, synthetic construct
  source 1..20: mol_type = other DNA
cacagcgcccggccgagaat

SEQ ID NO: 287839 - DNA, 20 bp, synthetic construct
  source 1..20: mol_type = other DNA
ccacagcgcccggccgagaa

SEQ ID NO: 287840 - DNA, 20 bp, synthetic construct
  source 1..20: mol_type = other DNA
gccacagcgcccggccgaga

SEQ ID NO: 287841 - DNA, 20 bp, synthetic construct
  source 1..20: mol_type = other DNA
agccacagcgcccggccgag

SEQ ID NO: 287842 - DNA, 20 bp, synthetic construct
  source 1..20: mol_type = other DNA
gagccacagcgcccggccga

SEQ ID NO: 287843 - DNA, 20 bp, synthetic construct
  source 1..20: mol_type = other DNA
tgagccacagcgcccggccg

SEQ ID NO: 287844 - DNA, 20 bp, synthetic construct
  source 1..20: mol_type = other DNA
gtgagccacagcgcccggcc

SEQ ID NO: 287845 - DNA, 20 bp, synthetic construct
  source 1..20: mol_type = other DNA
cgtgagccacagcgcccggc

SEQ ID NO: 287846 - DNA, 20 bp, synthetic construct
  source 1..20: mol_type = other DNA
gcgtgagccacagcgcccgg

SEQ ID NO: 287847 - DNA, 20 bp, synthetic construct
  source 1..20: mol_type = other DNA
ggcgtgagccacagcgcccg

SEQ ID NO: 287848 - DNA, 20 bp, synthetic construct
  source 1..20: mol_type = other DNA
aggcgtgagccacagcgccc

SEQ ID NO: 287849 - DNA, 20 bp, synthetic construct
  source 1..20: mol_type = other DNA
caggcgtgagccacagcgcc

SEQ ID NO: 287850 - DNA, 20 bp, synthetic construct
  source 1..20: mol_type = other DNA
acaggcgtgagccacagcgc

SEQ ID NO: 287851 - DNA, 20 bp, synthetic construct
  source 1..20: mol_type = other DNA
tacaggcgtgagccacagcg

SEQ ID NO: 287852 - DNA, 20 bp, synthetic construct
  source 1..20: mol_type = other DNA
ttacaggcgtgagccacagc

SEQ ID NO: 287853 - DNA, 20 bp, synthetic construct
  source 1..20: mol_type = other DNA
attacaggcgtgagccacag

SEQ ID NO: 287854 - DNA, 20 bp, synthetic construct
  source 1..20: mol_type = other DNA
aattacaggcgtgagccaca

SEQ ID NO: 287855 - DNA, 20 bp, synthetic construct
  source 1..20: mol_type = other DNA
gaattacaggcgtgagccac

SEQ ID NO: 287856 - DNA, 20 bp, synthetic construct
  source 1..20: mol_type = other DNA
ggaattacaggcgtgagcca

SEQ ID NO: 287857 - DNA, 20 bp, synthetic construct
  source 1..20: mol_type = other DNA
tggaattacaggcgtgagcc

SEQ ID NO: 287858 - DNA, 20 bp, synthetic construct
  source 1..20: mol_type = other DNA
ctggaattacaggcgtgagc

SEQ ID NO: 287859 - DNA, 20 bp, synthetic construct
  source 1..20: mol_type = other DNA
gctggaattacaggcgtgag

SEQ ID NO: 287860 - DNA, 20 bp, synthetic construct
  source 1..20: mol_type = other DNA
tgctggaattacaggcgtga

SEQ ID NO: 287861 - DNA, 20 bp, synthetic construct
  source 1..20: mol_type = other DNA
gtgctggaattacaggcgtg

SEQ ID NO: 287862 - DNA, 20 bp, synthetic construct
  source 1..20: mol_type = other DNA
agtgctggaattacaggcgt

SEQ ID NO: 287863 - DNA, 20 bp, synthetic construct
  source 1..20: mol_type = other DNA
aagtgctggaattacaggcg

SEQ ID NO: 287864 - DNA, 20 bp, synthetic construct
  source 1..20: mol_type = other DNA
aaagtgctggaattacaggc

SEQ ID NO: 287865 - DNA, 20 bp, synthetic construct
  source 1..20: mol_type = other DNA
caaagtgctggaattacagg

SEQ ID NO: 287866 - DNA, 20 bp, synthetic construct
  source 1..20: mol_type = other DNA
ccaaagtgctggaattacag

SEQ ID NO: 287867 - DNA, 20 bp, synthetic construct
  source 1..20: mol_type = other DNA
cccaaagtgctggaattaca

SEQ ID NO: 287868 - DNA, 20 bp, synthetic construct
  source 1..20: mol_type = other DNA
tcccaaagtgctggaattac

SEQ ID NO: 287869 - DNA, 20 bp, synthetic construct
  source 1..20: mol_type = other DNA
ctcccaaagtgctggaatta

SEQ ID NO: 287870 - DNA, 20 bp, synthetic construct
  source 1..20: mol_type = other DNA
cctcccaaagtgctggaatt

SEQ ID NO: 287871 - DNA, 20 bp, synthetic construct
  source 1..20: mol_type = other DNA
gcctcccaaagtgctggaat

SEQ ID NO: 287872 - DNA, 20 bp, synthetic construct
  source 1..20: mol_type = other DNA
ggcctcccaaagtgctggaa

SEQ ID NO: 287873 - DNA, 20 bp, synthetic construct
  source 1..20: mol_type = other DNA
tggcctcccaaagtgctgga

SEQ ID NO: 287874 - DNA, 20 bp, synthetic construct
  source 1..20: mol_type = other DNA
ttggcctcccaaagtgctgg

SEQ ID NO: 287875 - DNA, 20 bp, synthetic construct
  source 1..20: mol_type = other DNA
cttggcctcccaaagtgctg

SEQ ID NO: 287876 - DNA, 20 bp, synthetic construct
  source 1..20: mol_type = other DNA
ccttggcctcccaaagtgct

SEQ ID NO: 287877 - DNA, 20 bp, synthetic construct
  source 1..20: mol_type = other DNA
accttggcctcccaaagtgc

SEQ ID NO: 287878 - DNA, 20 bp, synthetic construct
  source 1..20: mol_type = other DNA
caccttggcctcccaaagtg

SEQ ID NO: 287879 - DNA, 20 bp, synthetic construct
  source 1..20: mol_type = other DNA
ccaccttggcctcccaaagt

SEQ ID NO: 287880 - DNA, 20 bp, synthetic construct
  source 1..20: mol_type = other DNA
cccaccttggcctcccaaag

SEQ ID NO: 287881 - DNA, 20 bp, synthetic construct
  source 1..20: mol_type = other DNA
acccaccttggcctcccaaa

SEQ ID NO: 287882 - DNA, 20 bp, synthetic construct
  source 1..20: mol_type = other DNA
cacccaccttggcctcccaa

SEQ ID NO: 287883 - DNA, 20 bp, synthetic construct
  source 1..20: mol_type = other DNA
ccacccaccttggcctccca

SEQ ID NO: 287884 - DNA, 20 bp, synthetic construct
  source 1..20: mol_type = other DNA
tccacccaccttggcctccc

SEQ ID NO: 287885 - DNA, 20 bp, synthetic construct
  source 1..20: mol_type = other DNA
atccacccaccttggcctcc

SEQ ID NO: 287886 - DNA, 20 bp, synthetic construct
  source 1..20: mol_type = other DNA
gatccacccaccttggcctc

SEQ ID NO: 287887 - DNA, 20 bp, synthetic construct
  source 1..20: mol_type = other DNA
tgatccacccaccttggcct

SEQ ID NO: 287888 - DNA, 20 bp, synthetic construct
  source 1..20: mol_type = other DNA
atgatccacccaccttggcc

SEQ ID NO: 287889 - DNA, 20 bp, synthetic construct
  source 1..20: mol_type = other DNA
catgatccacccaccttggc

SEQ ID NO: 287890 - DNA, 20 bp, synthetic construct
  source 1..20: mol_type = other DNA
tcatgatccacccaccttgg

SEQ ID NO: 287891 - DNA, 20 bp, synthetic construct
  source 1..20: mol_type = other DNA
ctcatgatccacccaccttg

SEQ ID NO: 287892 - DNA, 20 bp, synthetic construct
  source 1..20: mol_type = other DNA
cctcatgatccacccacctt

SEQ ID NO: 287893 - DNA, 20 bp, synthetic construct
  source 1..20: mol_type = other DNA
acctcatgatccacccacct

SEQ ID NO: 287894 - DNA, 20 bp, synthetic construct
  source 1..20: mol_type = other DNA
gacctcatgatccacccacc

SEQ ID NO: 287895 - DNA, 20 bp, synthetic construct
  source 1..20: mol_type = other DNA
tgacctcatgatccacccac

SEQ ID NO: 287896 - DNA, 20 bp, synthetic construct
  source 1..20: mol_type = other DNA
ctgacctcatgatccaccca

SEQ ID NO: 287897 - DNA, 20 bp, synthetic construct
  source 1..20: mol_type = other DNA
cctgacctcatgatccaccc

SEQ ID NO: 287898 - DNA, 20 bp, synthetic construct
  source 1..20: mol_type = other DNA
tcctgacctcatgatccacc

SEQ ID NO: 287899 - DNA, 20 bp, synthetic construct
  source 1..20: mol_type = other DNA
ctcctgacctcatgatccac

SEQ ID NO: 287900 - DNA, 20 bp, synthetic construct
  source 1..20: mol_type = other DNA
tctcctgacctcatgatcca

SEQ ID NO: 287901 - DNA, 20 bp, synthetic construct
  source 1..20: mol_type = other DNA
atctcctgacctcatgatcc

SEQ ID NO: 287902 - DNA, 20 bp, synthetic construct
  source 1..20: mol_type = other DNA
aatctcctgacctcatgatc

SEQ ID NO: 287903 - DNA, 20 bp, synthetic construct
  source 1..20: mol_type = other DNA
caatctcctgacctcatgat

SEQ ID NO: 287904 - DNA, 20 bp, synthetic construct
  source 1..20: mol_type = other DNA
tcaatctcctgacctcatga

SEQ ID NO: 287905 - DNA, 20 bp, synthetic construct
  source 1..20: mol_type = other DNA
ctcaatctcctgacctcatg

SEQ ID NO: 287906 - DNA, 20 bp, synthetic construct
  source 1..20: mol_type = other DNA
tctcaatctcctgacctcat

SEQ ID NO: 287907 - DNA, 20 bp, synthetic construct
  source 1..20: mol_type = other DNA
gtctcaatctcctgacctca

SEQ ID NO: 287908 - DNA, 20 bp, synthetic construct
  source 1..20: mol_type = other DNA
ggtctcaatctcctgacctc

SEQ ID NO: 287909 - DNA, 20 bp, synthetic construct
  source 1..20: mol_type = other DNA
tggtctcaatctcctgacct

SEQ ID NO: 287910 - DNA, 20 bp, synthetic construct
  source 1..20: mol_type = other DNA
atggtctcaatctcctgacc

SEQ ID NO: 287911 - DNA, 20 bp, synthetic construct
  source 1..20: mol_type = other DNA
gatggtctcaatctcctgac

SEQ ID NO: 287912 - DNA, 20 bp, synthetic construct
  source 1..20: mol_type = other DNA
ggatggtctcaatctcctga

SEQ ID NO: 287913 - DNA, 20 bp, synthetic construct
  source 1..20: mol_type = other DNA
aggatggtctcaatctcctg

SEQ ID NO: 287914 - DNA, 20 bp, synthetic construct
  source 1..20: mol_type = other DNA
caggatggtctcaatctcct

SEQ ID NO: 287915 - DNA, 20 bp, synthetic construct
  source 1..20: mol_type = other DNA
ccaggatggtctcaatctcc

SEQ ID NO: 287916 - DNA, 20 bp, synthetic construct
  source 1..20: mol_type = other DNA
gccaggatggtctcaatctc

SEQ ID NO: 287917 - DNA, 20 bp, synthetic construct
  source 1..20: mol_type = other DNA
agccaggatggtctcaatct

SEQ ID NO: 287918 - DNA, 20 bp, synthetic construct
  source 1..20: mol_type = other DNA
tagccaggatggtctcaatc

SEQ ID NO: 287919 - DNA, 20 bp, synthetic construct
  source 1..20: mol_type = other DNA
ttagccaggatggtctcaat

SEQ ID NO: 287920 - DNA, 20 bp, synthetic construct
  source 1..20: mol_type = other DNA
gttagccaggatggtctcaa

SEQ ID NO: 287921 - DNA, 20 bp, synthetic construct
  source 1..20: mol_type = other DNA
tgttagccaggatggtctca

SEQ ID NO: 287922 - DNA, 20 bp, synthetic construct
  source 1..20: mol_type = other DNA
gtgttagccaggatggtctc

SEQ ID NO: 287923 - DNA, 20 bp, synthetic construct
  source 1..20: mol_type = other DNA
tgtgttagccaggatggtct

SEQ ID NO: 287924 - DNA, 20 bp, synthetic construct
  source 1..20: mol_type = other DNA
ctgtgttagccaggatggtc

SEQ ID NO: 287925 - DNA, 20 bp, synthetic construct
  source 1..20: mol_type = other DNA
actgtgttagccaggatggt

SEQ ID NO: 287926 - DNA, 20 bp, synthetic construct
  source 1..20: mol_type = other DNA
cactgtgttagccaggatgg

SEQ ID NO: 287927 - DNA, 20 bp, synthetic construct
  source 1..20: mol_type = other DNA
tcactgtgttagccaggatg

SEQ ID NO: 287928 - DNA, 20 bp, synthetic construct
  source 1..20: mol_type = other DNA
ttcactgtgttagccaggat

SEQ ID NO: 287929 - DNA, 20 bp, synthetic construct
  source 1..20: mol_type = other DNA
tttcactgtgttagccagga

SEQ ID NO: 287930 - DNA, 20 bp, synthetic construct
  source 1..20: mol_type = other DNA
gtttcactgtgttagccagg

SEQ ID NO: 287931 - DNA, 20 bp, synthetic construct
  source 1..20: mol_type = other DNA
ggtttcactgtgttagccag

SEQ ID NO: 287932 - DNA, 20 bp, synthetic construct
  source 1..20: mol_type = other DNA
gggtttcactgtgttagcca

SEQ ID NO: 287933 - DNA, 20 bp, synthetic construct
  source 1..20: mol_type = other DNA
ggggtttcactgtgttagcc

SEQ ID NO: 287934 - DNA, 20 bp, synthetic construct
  source 1..20: mol_type = other DNA
cggggtttcactgtgttagc

SEQ ID NO: 287935 - DNA, 20 bp, synthetic construct
  source 1..20: mol_type = other DNA
acggggtttcactgtgttag

SEQ ID NO: 287936 - DNA, 20 bp, synthetic construct
  source 1..20: mol_type = other DNA
gacggggtttcactgtgtta

SEQ ID NO: 287937 - DNA, 20 bp, synthetic construct
  source 1..20: mol_type = other DNA
agacggggtttcactgtgtt

SEQ ID NO: 287938 - DNA, 20 bp, synthetic construct
  source 1..20: mol_type = other DNA
gagacggggtttcactgtgt

SEQ ID NO: 287939 - DNA, 20 bp, synthetic construct
  source 1..20: mol_type = other DNA
agagacggggtttcactgtg

SEQ ID NO: 287940 - DNA, 20 bp, synthetic construct
  source 1..20: mol_type = other DNA
tagagacggggtttcactgt

SEQ ID NO: 287941 - DNA, 20 bp, synthetic construct
  source 1..20: mol_type = other DNA
gtagagacggggtttcactg

SEQ ID NO: 287942 - DNA, 20 bp, synthetic construct
  source 1..20: mol_type = other DNA
agtagagacggggtttcact

SEQ ID NO: 287943 - DNA, 20 bp, synthetic construct
  source 1..20: mol_type = other DNA
tagtagagacggggtttcac

SEQ ID NO: 287944 - DNA, 20 bp, synthetic construct
  source 1..20: mol_type = other DNA
ttagtagagacggggtttca

SEQ ID NO: 287945 - DNA, 20 bp, synthetic construct
  source 1..20: mol_type = other DNA
tttagtagagacggggtttc

SEQ ID NO: 287946 - DNA, 20 bp, synthetic construct
  source 1..20: mol_type = other DNA
ttttagtagagacggggttt

SEQ ID NO: 287947 - DNA, 20 bp, synthetic construct
  source 1..20: mol_type = other DNA
tttttagtagagacggggtt

SEQ ID NO: 287948 - DNA, 20 bp, synthetic construct
  source 1..20: mol_type = other DNA
atttttagtagagacggggt

SEQ ID NO: 287949 - DNA, 20 bp, synthetic construct
  source 1..20: mol_type = other DNA
tatttttagtagagacgggg

SEQ ID NO: 287950 - DNA, 20 bp, synthetic construct
  source 1..20: mol_type = other DNA
gtatttttagtagagacggg

SEQ ID NO: 287951 - DNA, 20 bp, synthetic construct
  source 1..20: mol_type = other DNA
tgtatttttagtagagacgg

SEQ ID NO: 287952 - DNA, 20 bp, synthetic construct
  source 1..20: mol_type = other DNA
ttgtatttttagtagagacg

SEQ ID NO: 287953 - DNA, 20 bp, synthetic construct
  source 1..20: mol_type = other DNA
tttgtatttttagtagagac

SEQ ID NO: 287954 - DNA, 20 bp, synthetic construct
  source 1..20: mol_type = other DNA
ttttgtatttttagtagaga

SEQ ID NO: 287955 - DNA, 20 bp, synthetic construct
  source 1..20: mol_type = other DNA
tttttgtatttttagtagag

SEQ ID NO: 287956 - DNA, 20 bp, synthetic construct
  source 1..20: mol_type = other DNA
ttttttgtatttttagtaga

SEQ ID NO: 287957 - DNA, 20 bp, synthetic construct
  source 1..20: mol_type = other DNA
attttttgtatttttagtag

SEQ ID NO: 287958 - DNA, 20 bp, synthetic construct
  source 1..20: mol_type = other DNA
aattttttgtatttttagta

SEQ ID NO: 287959 - DNA, 20 bp, synthetic construct
  source 1..20: mol_type = other DNA
taattttttgtatttttagt

SEQ ID NO: 287960 - DNA, 20 bp, synthetic construct
  source 1..20: mol_type = other DNA
ctaattttttgtatttttag

SEQ ID NO: 287961 - DNA, 20 bp, synthetic construct
  source 1..20: mol_type = other DNA
gctaattttttgtattttta

SEQ ID NO: 287962 - DNA, 20 bp, synthetic construct
  source 1..20: mol_type = other DNA
ggctaattttttgtattttt

SEQ ID NO: 287963 - DNA, 20 bp, synthetic construct
  source 1..20: mol_type = other DNA
cggctaattttttgtatttt

SEQ ID NO: 287964 - DNA, 20 bp, synthetic construct
  source 1..20: mol_type = other DNA
ccggctaattttttgtattt

SEQ ID NO: 287965 - DNA, 20 bp, synthetic construct
  source 1..20: mol_type = other DNA
cccggctaattttttgtatt

SEQ ID NO: 287966 - DNA, 20 bp, synthetic construct
  source 1..20: mol_type = other DNA
gcccggctaattttttgtat

SEQ ID NO: 287967 - DNA, 20 bp, synthetic construct
  source 1..20: mol_type = other DNA
cgcccggctaattttttgta

SEQ ID NO: 287968 - DNA, 20 bp, synthetic construct
  source 1..20: mol_type = other DNA
acgcccggctaattttttgt

SEQ ID NO: 287969 - DNA, 20 bp, synthetic construct
  source 1..20: mol_type = other DNA
cacgcccggctaattttttg

SEQ ID NO: 287970 - DNA, 20 bp, synthetic construct
  source 1..20: mol_type = other DNA
ccacgcccggctaatttttt

SEQ ID NO: 287971 - DNA, 20 bp, synthetic construct
  source 1..20: mol_type = other DNA
accacgcccggctaattttt

SEQ ID NO: 287972 - DNA, 20 bp, synthetic construct
  source 1..20: mol_type = other DNA
caccacgcccggctaatttt

SEQ ID NO: 287973 - DNA, 20 bp, synthetic construct
  source 1..20: mol_type = other DNA
ccaccacgcccggctaattt

SEQ ID NO: 287974 - DNA, 20 bp, synthetic construct
  source 1..20: mol_type = other DNA
accaccacgcccggctaatt

SEQ ID NO: 287975 - DNA, 20 bp, synthetic construct
  source 1..20: mol_type = other DNA
caccaccacgcccggctaat

SEQ ID NO: 287976 - DNA, 20 bp, synthetic construct
  source 1..20: mol_type = other DNA
ccaccaccacgcccggctaa

SEQ ID NO: 287977 - DNA, 20 bp, synthetic construct
  source 1..20: mol_type = other DNA
cccaccaccacgcccggcta

SEQ ID NO: 287978 - DNA, 20 bp, synthetic construct
  source 1..20: mol_type = other DNA
gcccaccaccacgcccggct

SEQ ID NO: 287979 - DNA, 20 bp, synthetic construct
  source 1..20: mol_type = other DNA
cgcccaccaccacgcccggc

SEQ ID NO: 287980 - DNA, 20 bp, synthetic construct
  source 1..20: mol_type = other DNA
gcgcccaccaccacgcccgg

SEQ ID NO: 287981 - DNA, 20 bp, synthetic construct
  source 1..20: mol_type = other DNA
ggcgcccaccaccacgcccg

SEQ ID NO: 287982 - DNA, 20 bp, synthetic construct
  source 1..20: mol_type = other DNA
aggcgcccaccaccacgccc

SEQ ID NO: 287983 - DNA, 20 bp, synthetic construct
  source 1..20: mol_type = other DNA
caggcgcccaccaccacgcc

SEQ ID NO: 287984 - DNA, 20 bp, synthetic construct
  source 1..20: mol_type = other DNA
acaggcgcccaccaccacgc

SEQ ID NO: 287985 - DNA, 20 bp, synthetic construct
  source 1..20: mol_type = other DNA
tacaggcgcccaccaccacg

SEQ ID NO: 287986 - DNA, 20 bp, synthetic construct
  source 1..20: mol_type = other DNA
ctacaggcgcccaccaccac

SEQ ID NO: 287987 - DNA, 20 bp, synthetic construct
  source 1..20: mol_type = other DNA
actacaggcgcccaccacca

SEQ ID NO: 287988 - DNA, 20 bp, synthetic construct
  source 1..20: mol_type = other DNA
gactacaggcgcccaccacc

SEQ ID NO: 287989 - DNA, 20 bp, synthetic construct
  source 1..20: mol_type = other DNA
ggactacaggcgcccaccac

SEQ ID NO: 287990 - DNA, 20 bp, synthetic construct
  source 1..20: mol_type = other DNA
gggactacaggcgcccacca

SEQ ID NO: 287991 - DNA, 20 bp, synthetic construct
  source 1..20: mol_type = other DNA
tgggactacaggcgcccacc

SEQ ID NO: 287992 - DNA, 20 bp, synthetic construct
  source 1..20: mol_type = other DNA
ctgggactacaggcgcccac

SEQ ID NO: 287993 - DNA, 20 bp, synthetic construct
  source 1..20: mol_type = other DNA
gctgggactacaggcgccca

SEQ ID NO: 287994 - DNA, 20 bp, synthetic construct
  source 1..20: mol_type = other DNA
agctgggactacaggcgccc

SEQ ID NO: 287995 - DNA, 20 bp, synthetic construct
  source 1..20: mol_type = other DNA
tagctgggactacaggcgcc

SEQ ID NO: 287996 - DNA, 20 bp, synthetic construct
  source 1..20: mol_type = other DNA
gtagctgggactacaggcgc

SEQ ID NO: 287997 - DNA, 20 bp, synthetic construct
  source 1..20: mol_type = other DNA
agtagctgggactacaggcg

SEQ ID NO: 287998 - DNA, 20 bp, synthetic construct
  source 1..20: mol_type = other DNA
gagtagctgggactacaggc

SEQ ID NO: 287999 - DNA, 20 bp, synthetic construct
  source 1..20: mol_type = other DNA
ggagtagctgggactacagg

SEQ ID NO: 288000 - DNA, 20 bp, synthetic construct
  source 1..20: mol_type = other DNA
cggagtagctgggactacag

SEQ ID NO: 288001 - DNA, 20 bp, synthetic construct
  source 1..20: mol_type = other DNA
ccggagtagctgggactaca

SEQ ID NO: 288002 - DNA, 20 bp, synthetic construct
  source 1..20: mol_type = other DNA
tccggagtagctgggactac

SEQ ID NO: 288003 - DNA, 20 bp, synthetic construct
  source 1..20: mol_type = other DNA
ctccggagtagctgggacta

SEQ ID NO: 288004 - DNA, 20 bp, synthetic construct
  source 1..20: mol_type = other DNA
cctccggagtagctgggact

SEQ ID NO: 288005 - DNA, 20 bp, synthetic construct
  source 1..20: mol_type = other DNA
gcctccggagtagctgggac

SEQ ID NO: 288006 - DNA, 20 bp, synthetic construct
  source 1..20: mol_type = other DNA
agcctccggagtagctggga

SEQ ID NO: 288007 - DNA, 20 bp, synthetic construct
  source 1..20: mol_type = other DNA
cagcctccggagtagctggg

SEQ ID NO: 288008 - DNA, 20 bp, synthetic construct
  source 1..20: mol_type = other DNA
tcagcctccggagtagctgg

SEQ ID NO: 288009 - DNA, 20 bp, synthetic construct
  source 1..20: mol_type = other DNA
ctcagcctccggagtagctg

SEQ ID NO: 288010 - DNA, 20 bp, synthetic construct
  source 1..20: mol_type = other DNA
cctcagcctccggagtagct

SEQ ID NO: 288011 - DNA, 20 bp, synthetic construct
  source 1..20: mol_type = other DNA
gcctcagcctccggagtagc

SEQ ID NO: 288012 - DNA, 20 bp, synthetic construct
  source 1..20: mol_type = other DNA
tgcctcagcctccggagtag

SEQ ID NO: 288013 - DNA, 20 bp, synthetic construct
  source 1..20: mol_type = other DNA
ctgcctcagcctccggagta

SEQ ID NO: 288014 - DNA, 20 bp, synthetic construct
  source 1..20: mol_type = other DNA
cctgcctcagcctccggagt

SEQ ID NO: 288015 - DNA, 20 bp, synthetic construct
  source 1..20: mol_type = other DNA
tcctgcctcagcctccggag

SEQ ID NO: 288016 - DNA, 20 bp, synthetic construct
  source 1..20: mol_type = other DNA
ttcctgcctcagcctccgga

SEQ ID NO: 288017 - DNA, 20 bp, synthetic construct
  source 1..20: mol_type = other DNA
tttcctgcctcagcctccgg

SEQ ID NO: 288018 - DNA, 20 bp, synthetic construct
  source 1..20: mol_type = other DNA
ttttcctgcctcagcctccg

SEQ ID NO: 288019 - DNA, 20 bp, synthetic construct
  source 1..20: mol_type = other DNA
attttcctgcctcagcctcc

SEQ ID NO: 288020 - DNA, 20 bp, synthetic construct
  source 1..20: mol_type = other DNA
cattttcctgcctcagcctc

SEQ ID NO: 288021 - DNA, 20 bp, synthetic construct
  source 1..20: mol_type = other DNA
ccattttcctgcctcagcct

SEQ ID NO: 288022 - DNA, 20 bp, synthetic construct
  source 1..20: mol_type = other DNA
gccattttcctgcctcagcc

SEQ ID NO: 288023 - DNA, 20 bp, synthetic construct
  source 1..20: mol_type = other DNA
cgccattttcctgcctcagc

SEQ ID NO: 288024 - DNA, 20 bp, synthetic construct
  source 1..20: mol_type = other DNA
acgccattttcctgcctcag

SEQ ID NO: 288025 - DNA, 20 bp, synthetic construct
  source 1..20: mol_type = other DNA
cacgccattttcctgcctca

SEQ ID NO: 288026 - DNA, 20 bp, synthetic construct
  source 1..20: mol_type = other DNA
tcacgccattttcctgcctc

SEQ ID NO: 288027 - DNA, 20 bp, synthetic construct
  source 1..20: mol_type = other DNA
ttcacgccattttcctgcct

SEQ ID NO: 288028 - DNA, 20 bp, synthetic construct
  source 1..20: mol_type = other DNA
gttcacgccattttcctgcc

SEQ ID NO: 288029 - DNA, 20 bp, synthetic construct
  source 1..20: mol_type = other DNA
ggttcacgccattttcctgc

SEQ ID NO: 288030 - DNA, 20 bp, synthetic construct
  source 1..20: mol_type = other DNA
gggttcacgccattttcctg

SEQ ID NO: 288031 - DNA, 20 bp, synthetic construct
  source 1..20: mol_type = other DNA
cgggttcacgccattttcct

SEQ ID NO: 288032 - DNA, 20 bp, synthetic construct
  source 1..20: mol_type = other DNA
ccgggttcacgccattttcc

SEQ ID NO: 288033 - DNA, 20 bp, synthetic construct
  source 1..20: mol_type = other DNA
tccgggttcacgccattttc

SEQ ID NO: 288034 - DNA, 20 bp, synthetic construct
  source 1..20: mol_type = other DNA
ttccgggttcacgccatttt

SEQ ID NO: 288035 - DNA, 20 bp, synthetic construct
  source 1..20: mol_type = other DNA
cttccgggttcacgccattt

SEQ ID NO: 288036 - DNA, 20 bp, synthetic construct
  source 1..20: mol_type = other DNA
ccttccgggttcacgccatt

SEQ ID NO: 288037 - DNA, 20 bp, synthetic construct
  source 1..20: mol_type = other DNA
gccttccgggttcacgccat

SEQ ID NO: 288038 - DNA, 20 bp, synthetic construct
  source 1..20: mol_type = other DNA
cgccttccgggttcacgcca

SEQ ID NO: 288039 - DNA, 20 bp, synthetic construct
  source 1..20: mol_type = other DNA
ccgccttccgggttcacgcc

SEQ ID NO: 288040 - DNA, 20 bp, synthetic construct
  source 1..20: mol_type = other DNA
tccgccttccgggttcacgc

SEQ ID NO: 288041 - DNA, 20 bp, synthetic construct
  source 1..20: mol_type = other DNA
ctccgccttccgggttcacg

SEQ ID NO: 288042 - DNA, 20 bp, synthetic construct
  source 1..20: mol_type = other DNA
gctccgccttccgggttcac

SEQ ID NO: 288043 - DNA, 20 bp, synthetic construct
  source 1..20: mol_type = other DNA
agctccgccttccgggttca

SEQ ID NO: 288044 - DNA, 20 bp, synthetic construct
  source 1..20: mol_type = other DNA
aagctccgccttccgggttc

SEQ ID NO: 288045 - DNA, 20 bp, synthetic construct
  source 1..20: mol_type = other DNA
caagctccgccttccgggtt

SEQ ID NO: 288046 - DNA, 20 bp, synthetic construct
  source 1..20: mol_type = other DNA
gcaagctccgccttccgggt

SEQ ID NO: 288047 - DNA, 20 bp, synthetic construct
  source 1..20: mol_type = other DNA
tgcaagctccgccttccggg

SEQ ID NO: 288048 - DNA, 20 bp, synthetic construct
  source 1..20: mol_type = other DNA
ctgcaagctccgccttccgg

SEQ ID NO: 288049 - DNA, 20 bp, synthetic construct
  source 1..20: mol_type = other DNA
actgcaagctccgccttccg

SEQ ID NO: 288050 - DNA, 20 bp, synthetic construct
  source 1..20: mol_type = other DNA
cactgcaagctccgccttcc

SEQ ID NO: 288051 - DNA, 20 bp, synthetic construct
  source 1..20: mol_type = other DNA
tcactgcaagctccgccttc

SEQ ID NO: 288052 - DNA, 20 bp, synthetic construct
  source 1..20: mol_type = other DNA
ctcactgcaagctccgcctt

SEQ ID NO: 288053 - DNA, 20 bp, synthetic construct
  source 1..20: mol_type = other DNA
gctcactgcaagctccgcct

SEQ ID NO: 288054 - DNA, 20 bp, synthetic construct
  source 1..20: mol_type = other DNA
cgctcactgcaagctccgcc

SEQ ID NO: 288055 - DNA, 20 bp, synthetic construct
  source 1..20: mol_type = other DNA
ccgctcactgcaagctccgc

SEQ ID NO: 288056 - DNA, 20 bp, synthetic construct
  source 1..20: mol_type = other DNA
tccgctcactgcaagctccg

SEQ ID NO: 288057 - DNA, 20 bp, synthetic construct
  source 1..20: mol_type = other DNA
ctccgctcactgcaagctcc

SEQ ID NO: 288058 - DNA, 20 bp, synthetic construct
  source 1..20: mol_type = other DNA
actccgctcactgcaagctc

SEQ ID NO: 288059 - DNA, 20 bp, synthetic construct
  source 1..20: mol_type = other DNA
cactccgctcactgcaagct

SEQ ID NO: 288060 - DNA, 20 bp, synthetic construct
  source 1..20: mol_type = other DNA
tcactccgctcactgcaagc

SEQ ID NO: 288061 - DNA, 20 bp, synthetic construct
  source 1..20: mol_type = other DNA
ctcactccgctcactgcaag

SEQ ID NO: 288062 - DNA, 20 bp, synthetic construct
  source 1..20: mol_type = other DNA
gctcactccgctcactgcaa

SEQ ID NO: 288063 - DNA, 20 bp, synthetic construct
  source 1..20: mol_type = other DNA
tgctcactccgctcactgca

SEQ ID NO: 288064 - DNA, 20 bp, synthetic construct
  source 1..20: mol_type = other DNA
ctgctcactccgctcactgc

SEQ ID NO: 288065 - DNA, 20 bp, synthetic construct
  source 1..20: mol_type = other DNA
tctgctcactccgctcactg

SEQ ID NO: 288066 - DNA, 20 bp, synthetic construct
  source 1..20: mol_type = other DNA
ctctgctcactccgctcact

SEQ ID NO: 288067 - DNA, 20 bp, synthetic construct
  source 1..20: mol_type = other DNA
tctctgctcactccgctcac

SEQ ID NO: 288068 - DNA, 20 bp, synthetic construct
  source 1..20: mol_type = other DNA
atctctgctcactccgctca

SEQ ID NO: 288069 - DNA, 20 bp, synthetic construct
  source 1..20: mol_type = other DNA
gatctctgctcactccgctc

SEQ ID NO: 288070 - DNA, 20 bp, synthetic construct
  source 1..20: mol_type = other DNA
cgatctctgctcactccgct

SEQ ID NO: 288071 - DNA, 20 bp, synthetic construct
  source 1..20: mol_type = other DNA
gcgatctctgctcactccgc

SEQ ID NO: 288072 - DNA, 20 bp, synthetic construct
  source 1..20: mol_type = other DNA
cgcgatctctgctcactccg

SEQ ID NO: 288073 - DNA, 20 bp, synthetic construct
  source 1..20: mol_type = other DNA
gcgcgatctctgctcactcc

SEQ ID NO: 288074 - DNA, 20 bp, synthetic construct
  source 1..20: mol_type = other DNA
ggcgcgatctctgctcactc

SEQ ID NO: 288075 - DNA, 20 bp, synthetic construct
  source 1..20: mol_type = other DNA
tggcgcgatctctgctcact

SEQ ID NO: 288076 - DNA, 20 bp, synthetic construct
  source 1..20: mol_type = other DNA
gtggcgcgatctctgctcac

SEQ ID NO: 288077 - DNA, 20 bp, synthetic construct
  source 1..20: mol_type = other DNA
agtggcgcgatctctgctca

SEQ ID NO: 288078 - DNA, 20 bp, synthetic construct
  source 1..20: mol_type = other DNA
cagtggcgcgatctctgctc

SEQ ID NO: 288079 - DNA, 20 bp, synthetic construct
  source 1..20: mol_type = other DNA
gcagtggcgcgatctctgct

SEQ ID NO: 288080 - DNA, 20 bp, synthetic construct
  source 1..20: mol_type = other DNA
tgcagtggcgcgatctctgc

SEQ ID NO: 288081 - DNA, 20 bp, synthetic construct
  source 1..20: mol_type = other DNA
gtgcagtggcgcgatctctg

SEQ ID NO: 288082 - DNA, 20 bp, synthetic construct
  source 1..20: mol_type = other DNA
agtgcagtggcgcgatctct

SEQ ID NO: 288083 - DNA, 20 bp, synthetic construct
  source 1..20: mol_type = other DNA
gagtgcagtggcgcgatctc

SEQ ID NO: 288084 - DNA, 20 bp, synthetic construct
  source 1..20: mol_type = other DNA
ggagtgcagtggcgcgatct

SEQ ID NO: 288085 - DNA, 20 bp, synthetic construct
  source 1..20: mol_type = other DNA
tggagtgcagtggcgcgatc

SEQ ID NO: 288086 - DNA, 20 bp, synthetic construct
  source 1..20: mol_type = other DNA
ctggagtgcagtggcgcgat

SEQ ID NO: 288087 - DNA, 20 bp, synthetic construct
  source 1..20: mol_type = other DNA
gctggagtgcagtggcgcga

SEQ ID NO: 288088 - DNA, 20 bp, synthetic construct
  source 1..20: mol_type = other DNA
ggctggagtgcagtggcgcg

SEQ ID NO: 288089 - DNA, 20 bp, synthetic construct
  source 1..20: mol_type = other DNA
aggctggagtgcagtggcgc

SEQ ID NO: 288090 - DNA, 20 bp, synthetic construct
  source 1..20: mol_type = other DNA
caggctggagtgcagtggcg

SEQ ID NO: 288091 - DNA, 20 bp, synthetic construct
  source 1..20: mol_type = other DNA
ccaggctggagtgcagtggc

SEQ ID NO: 288092 - DNA, 20 bp, synthetic construct
  source 1..20: mol_type = other DNA
cccaggctggagtgcagtgg

SEQ ID NO: 288093 - DNA, 20 bp, synthetic construct
  source 1..20: mol_type = other DNA
gcccaggctggagtgcagtg

SEQ ID NO: 288094 - DNA, 20 bp, synthetic construct
  source 1..20: mol_type = other DNA
cgcccaggctggagtgcagt

SEQ ID NO: 288095 - DNA, 20 bp, synthetic construct
  source 1..20: mol_type = other DNA
tcgcccaggctggagtgcag

SEQ ID NO: 288096 - DNA, 20 bp, synthetic construct
  source 1..20: mol_type = other DNA
gtcgcccaggctggagtgca

SEQ ID NO: 288097 - DNA, 20 bp, synthetic construct
  source 1..20: mol_type = other DNA
tgtcgcccaggctggagtgc

SEQ ID NO: 288098 - DNA, 20 bp, synthetic construct
  source 1..20: mol_type = other DNA
ctgtcgcccaggctggagtg

SEQ ID NO: 288099 - DNA, 20 bp, synthetic construct
  source 1..20: mol_type = other DNA
tctgtcgcccaggctggagt

SEQ ID NO: 288100 - DNA, 20 bp, synthetic construct
  source 1..20: mol_type = other DNA
ctctgtcgcccaggctggag

SEQ ID NO: 288101 - DNA, 20 bp, synthetic construct
  source 1..20: mol_type = other DNA
gctctgtcgcccaggctgga

SEQ ID NO: 288102 - DNA, 20 bp, synthetic construct
  source 1..20: mol_type = other DNA
cgctctgtcgcccaggctgg

SEQ ID NO: 288103 - DNA, 20 bp, synthetic construct
  source 1..20: mol_type = other DNA
tcgctctgtcgcccaggctg

SEQ ID NO: 288104 - DNA, 20 bp, synthetic construct
  source 1..20: mol_type = other DNA
ctcgctctgtcgcccaggct

SEQ ID NO: 288105 - DNA, 20 bp, synthetic construct
  source 1..20: mol_type = other DNA
tctcgctctgtcgcccaggc

SEQ ID NO: 288106 - DNA, 20 bp, synthetic construct
  source 1..20: mol_type = other DNA
gtctcgctctgtcgcccagg

SEQ ID NO: 288107 - DNA, 20 bp, synthetic construct
  source 1..20: mol_type = other DNA
agtctcgctctgtcgcccag

SEQ ID NO: 288108 - DNA, 20 bp, synthetic construct
  source 1..20: mol_type = other DNA
gagtctcgctctgtcgccca

SEQ ID NO: 288109 - DNA, 20 bp, synthetic construct
  source 1..20: mol_type = other DNA
ggagtctcgctctgtcgccc

SEQ ID NO: 288110 - DNA, 20 bp, synthetic construct
  source 1..20: mol_type = other DNA
cggagtctcgctctgtcgcc

SEQ ID NO: 288111 - DNA, 20 bp, synthetic construct
  source 1..20: mol_type = other DNA
acggagtctcgctctgtcgc

SEQ ID NO: 288112 - DNA, 20 bp, synthetic construct
  source 1..20: mol_type = other DNA
gacggagtctcgctctgtcg

SEQ ID NO: 288113 - DNA, 20 bp, synthetic construct
  source 1..20: mol_type = other DNA
agacggagtctcgctctgtc

SEQ ID NO: 288114 - DNA, 20 bp, synthetic construct
  source 1..20: mol_type = other DNA
gagacggagtctcgctctgt

SEQ ID NO: 288115 - DNA, 20 bp, synthetic construct
  source 1..20: mol_type = other DNA
tgagacggagtctcgctctg

SEQ ID NO: 288116 - DNA, 20 bp, synthetic construct
  source 1..20: mol_type = other DNA
ttgagacggagtctcgctct

SEQ ID NO: 288117 - DNA, 20 bp, synthetic construct
  source 1..20: mol_type = other DNA
tttgagacggagtctcgctc

SEQ ID NO: 288118 - DNA, 20 bp, synthetic construct
  source 1..20: mol_type = other DNA
ttttgagacggagtctcgct

SEQ ID NO: 288119 - DNA, 20 bp, synthetic construct
  source 1..20: mol_type = other DNA
tttttgagacggagtctcgc

SEQ ID NO: 288120 - DNA, 20 bp, synthetic construct
  source 1..20: mol_type = other DNA
ttttttgagacggagtctcg

SEQ ID NO: 288121 - DNA, 20 bp, synthetic construct
  source 1..20: mol_type = other DNA
tttttttgagacggagtctc

SEQ ID NO: 288122 - DNA, 20 bp, synthetic construct
  source 1..20: mol_type = other DNA
ttttttttgagacggagtct

SEQ ID NO: 288123 - DNA, 20 bp, synthetic construct
  source 1..20: mol_type = other DNA
tttttttttgagacggagtc

SEQ ID NO: 288124 - DNA, 20 bp, synthetic construct
  source 1..20: mol_type = other DNA
ttttttttttgagacggagt

SEQ ID NO: 288125 - DNA, 20 bp, synthetic construct
  source 1..20: mol_type = other DNA
tttttttttttgagacggag

SEQ ID NO: 288126 - DNA, 20 bp, synthetic construct
  source 1..20: mol_type = other DNA
ctttttttttttgagacgga

SEQ ID NO: 288127 - DNA, 20 bp, synthetic construct
  source 1..20: mol_type = other DNA
gctttttttttttgagacgg

SEQ ID NO: 288128 - DNA, 20 bp, synthetic construct
  source 1..20: mol_type = other DNA
tgctttttttttttgagacg

SEQ ID NO: 288129 - DNA, 20 bp, synthetic construct
  source 1..20: mol_type = other DNA
gtgctttttttttttgagac

SEQ ID NO: 288130 - DNA, 20 bp, synthetic construct
  source 1..20: mol_type = other DNA
tgtgctttttttttttgaga

SEQ ID NO: 288131 - DNA, 20 bp, synthetic construct
  source 1..20: mol_type = other DNA
atgtgctttttttttttgag

SEQ ID NO: 288132 - DNA, 20 bp, synthetic construct
  source 1..20: mol_type = other DNA
catgtgctttttttttttga

SEQ ID NO: 288133 - DNA, 20 bp, synthetic construct
  source 1..20: mol_type = other DNA
acatgtgctttttttttttg

SEQ ID NO: 288134 - DNA, 20 bp, synthetic construct
  source 1..20: mol_type = other DNA
aacatgtgcttttttttttt

SEQ ID NO: 288135 - DNA, 20 bp, synthetic construct
  source 1..20: mol_type = other DNA
gaacatgtgctttttttttt

SEQ ID NO: 288136 - DNA, 20 bp, synthetic construct
  source 1..20: mol_type = other DNA
agaacatgtgcttttttttt

SEQ ID NO: 288137 - DNA, 20 bp, synthetic construct
  source 1..20: mol_type = other DNA
gagaacatgtgctttttttt

SEQ ID NO: 288138 - DNA, 20 bp, synthetic construct
  source 1..20: mol_type = other DNA
cgagaacatgtgcttttttt

SEQ ID NO: 288139 - DNA, 20 bp, synthetic construct
  source 1..20: mol_type = other DNA
gcgagaacatgtgctttttt

SEQ ID NO: 288140 - DNA, 20 bp, synthetic construct
  source 1..20: mol_type = other DNA
agcgagaacatgtgcttttt

SEQ ID NO: 288141 - DNA, 20 bp, synthetic construct
  source 1..20: mol_type = other DNA
aagcgagaacatgtgctttt

SEQ ID NO: 288142 - DNA, 20 bp, synthetic construct
  source 1..20: mol_type = other DNA
gaagcgagaacatgtgcttt

SEQ ID NO: 288143 - DNA, 20 bp, synthetic construct
  source 1..20: mol_type = other DNA
agaagcgagaacatgtgctt

SEQ ID NO: 288144 - DNA, 20 bp, synthetic construct
  source 1..20: mol_type = other DNA
aagaagcgagaacatgtgct

SEQ ID NO: 288145 - DNA, 20 bp, synthetic construct
  source 1..20: mol_type = other DNA
aaagaagcgagaacatgtgc

SEQ ID NO: 288146 - DNA, 20 bp, synthetic construct
  source 1..20: mol_type = other DNA
caaagaagcgagaacatgtg

SEQ ID NO: 288147 - DNA, 20 bp, synthetic construct
  source 1..20: mol_type = other DNA
acaaagaagcgagaacatgt

SEQ ID NO: 288148 - DNA, 20 bp, synthetic construct
  source 1..20: mol_type = other DNA
cacaaagaagcgagaacatg

SEQ ID NO: 288149 - DNA, 20 bp, synthetic construct
  source 1..20: mol_type = other DNA
ccacaaagaagcgagaacat

SEQ ID NO: 288150 - DNA, 20 bp, synthetic construct
  source 1..20: mol_type = other DNA
cccacaaagaagcgagaaca

SEQ ID NO: 288151 - DNA, 20 bp, synthetic construct
  source 1..20: mol_type = other DNA
tcccacaaagaagcgagaac

SEQ ID NO: 288152 - DNA, 20 bp, synthetic construct
  source 1..20: mol_type = other DNA
atcccacaaagaagcgagaa

SEQ ID NO: 288153 - DNA, 20 bp, synthetic construct
  source 1..20: mol_type = other DNA
gatcccacaaagaagcgaga

SEQ ID NO: 288154 - DNA, 20 bp, synthetic construct
  source 1..20: mol_type = other DNA
ggatcccacaaagaagcgag

SEQ ID NO: 288155 - DNA, 20 bp, synthetic construct
  source 1..20: mol_type = other DNA
tggatcccacaaagaagcga

SEQ ID NO: 288156 - DNA, 20 bp, synthetic construct
  source 1..20: mol_type = other DNA
ctggatcccacaaagaagcg

SEQ ID NO: 288157 - DNA, 20 bp, synthetic construct
  source 1..20: mol_type = other DNA
cctggatcccacaaagaagc

SEQ ID NO: 288158 - DNA, 20 bp, synthetic construct
  source 1..20: mol_type = other DNA
tcctggatcccacaaagaag

SEQ ID NO: 288159 - DNA, 20 bp, synthetic construct
  source 1..20: mol_type = other DNA
ctcctggatcccacaaagaa

SEQ ID NO: 288160 - DNA, 20 bp, synthetic construct
  source 1..20: mol_type = other DNA
tctcctggatcccacaaaga

SEQ ID NO: 288161 - DNA, 20 bp, synthetic construct
  source 1..20: mol_type = other DNA
atctcctggatcccacaaag

SEQ ID NO: 288162 - DNA, 20 bp, synthetic construct
  source 1..20: mol_type = other DNA
tatctcctggatcccacaaa

SEQ ID NO: 288163 - DNA, 20 bp, synthetic construct
  source 1..20: mol_type = other DNA
ctatctcctggatcccacaa

SEQ ID NO: 288164 - DNA, 20 bp, synthetic construct
  source 1..20: mol_type = other DNA
tctatctcctggatcccaca

SEQ ID NO: 288165 - DNA, 20 bp, synthetic construct
  source 1..20: mol_type = other DNA
ctctatctcctggatcccac

SEQ ID NO: 288166 - DNA, 20 bp, synthetic construct
  source 1..20: mol_type = other DNA
tctctatctcctggatccca

SEQ ID NO: 288167 - DNA, 20 bp, synthetic construct
  source 1..20: mol_type = other DNA
ttctctatctcctggatccc

SEQ ID NO: 288168 - DNA, 20 bp, synthetic construct
  source 1..20: mol_type = other DNA
attctctatctcctggatcc

SEQ ID NO: 288169 - DNA, 20 bp, synthetic construct
  source 1..20: mol_type = other DNA
tattctctatctcctggatc

SEQ ID NO: 288170 - DNA, 20 bp, synthetic construct
  source 1..20: mol_type = other DNA
ctattctctatctcctggat

SEQ ID NO: 288171 - DNA, 20 bp, synthetic construct
  source 1..20: mol_type = other DNA
tctattctctatctcctgga

SEQ ID NO: 288172 - DNA, 20 bp, synthetic construct
  source 1..20: mol_type = other DNA
ttctattctctatctcctgg

SEQ ID NO: 288173 - DNA, 20 bp, synthetic construct
  source 1..20: mol_type = other DNA
cttctattctctatctcctg

SEQ ID NO: 288174 - DNA, 20 bp, synthetic construct
  source 1..20: mol_type = other DNA
ccttctattctctatctcct

SEQ ID NO: 288175 - DNA, 20 bp, synthetic construct
  source 1..20: mol_type = other DNA
tccttctattctctatctcc

SEQ ID NO: 288176 - DNA, 20 bp, synthetic construct
  source 1..20: mol_type = other DNA
atccttctattctctatctc

SEQ ID NO: 288177 - DNA, 20 bp, synthetic construct
  source 1..20: mol_type = other DNA
catccttctattctctatct

SEQ ID NO: 288178 - DNA, 20 bp, synthetic construct
  source 1..20: mol_type = other DNA
ccatccttctattctctatc

SEQ ID NO: 288179 - DNA, 20 bp, synthetic construct
  source 1..20: mol_type = other DNA
accatccttctattctctat

SEQ ID NO: 288180 - DNA, 20 bp, synthetic construct
  source 1..20: mol_type = other DNA
aaccatccttctattctcta

SEQ ID NO: 288181 - DNA, 20 bp, synthetic construct
  source 1..20: mol_type = other DNA
taaccatccttctattctct

SEQ ID NO: 288182 - DNA, 20 bp, synthetic construct
  source 1..20: mol_type = other DNA
gtaaccatccttctattctc

SEQ ID NO: 288183 - DNA, 20 bp, synthetic construct
  source 1..20: mol_type = other DNA
ggtaaccatccttctattct

SEQ ID NO: 288184 - DNA, 20 bp, synthetic construct
  source 1..20: mol_type = other DNA
tggtaaccatccttctattc

SEQ ID NO: 288185 - DNA, 20 bp, synthetic construct
  source 1..20: mol_type = other DNA
ctggtaaccatccttctatt

SEQ ID NO: 288186 - DNA, 20 bp, synthetic construct
  source 1..20: mol_type = other DNA
tctggtaaccatccttctat

SEQ ID NO: 288187 - DNA, 20 bp, synthetic construct
  source 1..20: mol_type = other DNA
ctctggtaaccatccttcta

SEQ ID NO: 288188 - DNA, 20 bp, synthetic construct
  source 1..20: mol_type = other DNA
cctctggtaaccatccttct

SEQ ID NO: 288189 - DNA, 20 bp, synthetic construct
  source 1..20: mol_type = other DNA
gcctctggtaaccatccttc

SEQ ID NO: 288190 - DNA, 20 bp, synthetic construct
  source 1..20: mol_type = other DNA
agcctctggtaaccatcctt

SEQ ID NO: 288191 - DNA, 20 bp, synthetic construct
  source 1..20: mol_type = other DNA
cagcctctggtaaccatcct

SEQ ID NO: 288192 - DNA, 20 bp, synthetic construct
  source 1..20: mol_type = other DNA
ccagcctctggtaaccatcc

SEQ ID NO: 288193 - DNA, 20 bp, synthetic construct
  source 1..20: mol_type = other DNA
cccagcctctggtaaccatc

SEQ ID NO: 288194 - DNA, 20 bp, synthetic construct
  source 1..20: mol_type = other DNA
tcccagcctctggtaaccat

SEQ ID NO: 288195 - DNA, 20 bp, synthetic construct
  source 1..20: mol_type = other DNA
ttcccagcctctggtaacca

SEQ ID NO: 288196 - DNA, 20 bp, synthetic construct
  source 1..20: mol_type = other DNA
cttcccagcctctggtaacc

SEQ ID NO: 288197 - DNA, 20 bp, synthetic construct
  source 1..20: mol_type = other DNA
ccttcccagcctctggtaac

SEQ ID NO: 288198 - DNA, 20 bp, synthetic construct
  source 1..20: mol_type = other DNA
cccttcccagcctctggtaa

SEQ ID NO: 288199 - DNA, 20 bp, synthetic construct
  source 1..20: mol_type = other DNA
acccttcccagcctctggta

SEQ ID NO: 288200 - DNA, 20 bp, synthetic construct
  source 1..20: mol_type = other DNA
tacccttcccagcctctggt

SEQ ID NO: 288201 - DNA, 20 bp, synthetic construct
  source 1..20: mol_type = other DNA
ctacccttcccagcctctgg

SEQ ID NO: 288202 - DNA, 20 bp, synthetic construct
  source 1..20: mol_type = other DNA
actacccttcccagcctctg

SEQ ID NO: 288203 - DNA, 20 bp, synthetic construct
  source 1..20: mol_type = other DNA
cactacccttcccagcctct

SEQ ID NO: 288204 - DNA, 20 bp, synthetic construct
  source 1..20: mol_type = other DNA
tcactacccttcccagcctc

SEQ ID NO: 288205 - DNA, 20 bp, synthetic construct
  source 1..20: mol_type = other DNA
ctcactacccttcccagcct

SEQ ID NO: 288206 - DNA, 20 bp, synthetic construct
  source 1..20: mol_type = other DNA
cctcactacccttcccagcc

SEQ ID NO: 288207 - DNA, 20 bp, synthetic construct
  source 1..20: mol_type = other DNA
ccctcactacccttcccagc

SEQ ID NO: 288208 - DNA, 20 bp, synthetic construct
  source 1..20: mol_type = other DNA
cccctcactacccttcccag

SEQ ID NO: 288209 - DNA, 20 bp, synthetic construct
  source 1..20: mol_type = other DNA
tcccctcactacccttccca

SEQ ID NO: 288210 - DNA, 20 bp, synthetic construct
  source 1..20: mol_type = other DNA
atcccctcactacccttccc

SEQ ID NO: 288211 - DNA, 20 bp, synthetic construct
  source 1..20: mol_type = other DNA
catcccctcactacccttcc

SEQ ID NO: 288212 - DNA, 20 bp, synthetic construct
  source 1..20: mol_type = other DNA
ccatcccctcactacccttc

SEQ ID NO: 288213 - DNA, 20 bp, synthetic construct
  source 1..20: mol_type = other DNA
accatcccctcactaccctt

SEQ ID NO: 288214 - DNA, 20 bp, synthetic construct
  source 1..20: mol_type = other DNA
caccatcccctcactaccct

SEQ ID NO: 288215 - DNA, 20 bp, synthetic construct
  source 1..20: mol_type = other DNA
ccaccatcccctcactaccc

SEQ ID NO: 288216 - DNA, 20 bp, synthetic construct
  source 1..20: mol_type = other DNA
cccaccatcccctcactacc

SEQ ID NO: 288217 - DNA, 20 bp, synthetic construct
  source 1..20: mol_type = other DNA
ccccaccatcccctcactac

SEQ ID NO: 288218 - DNA, 20 bp, synthetic construct
  source 1..20: mol_type = other DNA
cccccaccatcccctcacta

SEQ ID NO: 288219 - DNA, 20 bp, synthetic construct
  source 1..20: mol_type = other DNA
ccccccaccatcccctcact

SEQ ID NO: 288220 - DNA, 20 bp, synthetic construct
  source 1..20: mol_type = other DNA
tccccccaccatcccctcac

SEQ ID NO: 288221 - DNA, 20 bp, synthetic construct
  source 1..20: mol_type = other DNA
atccccccaccatcccctca

SEQ ID NO: 288222 - DNA, 20 bp, synthetic construct
  source 1..20: mol_type = other DNA
catccccccaccatcccctc

SEQ ID NO: 288223 - DNA, 20 bp, synthetic construct
  source 1..20: mol_type = other DNA
ccatccccccaccatcccct

SEQ ID NO: 288224 - DNA, 20 bp, synthetic construct
  source 1..20: mol_type = other DNA
accatccccccaccatcccc

SEQ ID NO: 288225 - DNA, 20 bp, synthetic construct
  source 1..20: mol_type = other DNA
gaccatccccccaccatccc

SEQ ID NO: 288226 - DNA, 20 bp, synthetic construct
  source 1..20: mol_type = other DNA
tgaccatccccccaccatcc

SEQ ID NO: 288227 - DNA, 20 bp, synthetic construct
  source 1..20: mol_type = other DNA
ttgaccatccccccaccatc

SEQ ID NO: 288228 - DNA, 20 bp, synthetic construct
  source 1..20: mol_type = other DNA
attgaccatccccccaccat

SEQ ID NO: 288229 - DNA, 20 bp, synthetic construct
  source 1..20: mol_type = other DNA
cattgaccatccccccacca

SEQ ID NO: 288230 - DNA, 20 bp, synthetic construct
  source 1..20: mol_type = other DNA
ccattgaccatccccccacc

SEQ ID NO: 288231 - DNA, 20 bp, synthetic construct
  source 1..20: mol_type = other DNA
cccattgaccatccccccac

SEQ ID NO: 288232 - DNA, 20 bp, synthetic construct
  source 1..20: mol_type = other DNA
acccattgaccatcccccca

SEQ ID NO: 288233 - DNA, 20 bp, synthetic construct
  source 1..20: mol_type = other DNA
tacccattgaccatcccccc

SEQ ID NO: 288234 - DNA, 20 bp, synthetic construct
  source 1..20: mol_type = other DNA
gtacccattgaccatccccc

SEQ ID NO: 288235 - DNA, 20 bp, synthetic construct
  source 1..20: mol_type = other DNA
tgtacccattgaccatcccc

SEQ ID NO: 288236 - DNA, 20 bp, synthetic construct
  source 1..20: mol_type = other DNA
ttgtacccattgaccatccc

SEQ ID NO: 288237 - DNA, 20 bp, synthetic construct
  source 1..20: mol_type = other DNA
tttgtacccattgaccatcc

SEQ ID NO: 288238 - DNA, 20 bp, synthetic construct
  source 1..20: mol_type = other DNA
ttttgtacccattgaccatc

SEQ ID NO: 288239 - DNA, 20 bp, synthetic construct
  source 1..20: mol_type = other DNA
tttttgtacccattgaccat

SEQ ID NO: 288240 - DNA, 20 bp, synthetic construct
  source 1..20: mol_type = other DNA
ttttttgtacccattgacca

SEQ ID NO: 288241 - DNA, 20 bp, synthetic construct
  source 1..20: mol_type = other DNA
tttttttgtacccattgacc

SEQ ID NO: 288242 - DNA, 20 bp, synthetic construct
  source 1..20: mol_type = other DNA
ttttttttgtacccattgac

SEQ ID NO: 288243 - DNA, 20 bp, synthetic construct
  source 1..20: mol_type = other DNA
attttttttgtacccattga

SEQ ID NO: 288244 - DNA, 20 bp, synthetic construct
  source 1..20: mol_type = other DNA
tattttttttgtacccattg

SEQ ID NO: 288245 - DNA, 20 bp, synthetic construct
  source 1..20: mol_type = other DNA
ctattttttttgtacccatt

SEQ ID NO: 288246 - DNA, 20 bp, synthetic construct
  source 1..20: mol_type = other DNA
tctattttttttgtacccat

SEQ ID NO: 288247 - DNA, 20 bp, synthetic construct
  source 1..20: mol_type = other DNA
ttctattttttttgtaccca

SEQ ID NO: 288248 - DNA, 20 bp, synthetic construct
  source 1..20: mol_type = other DNA
attctattttttttgtaccc

SEQ ID NO: 288249 - DNA, 20 bp, synthetic construct
  source 1..20: mol_type = other DNA
tattctattttttttgtacc

SEQ ID NO: 288250 - DNA, 20 bp, synthetic construct
  source 1..20: mol_type = other DNA
ttattctattttttttgtac

SEQ ID NO: 288251 - DNA, 20 bp, synthetic construct
  source 1..20: mol_type = other DNA
cttattctattttttttgta

SEQ ID NO: 288252 - DNA, 20 bp, synthetic construct
  source 1..20: mol_type = other DNA
tcttattctattttttttgt

SEQ ID NO: 288253 - DNA, 20 bp, synthetic construct
  source 1..20: mol_type = other DNA
gtcttattctattttttttg

SEQ ID NO: 288254 - DNA, 20 bp, synthetic construct
  source 1..20: mol_type = other DNA
ggtcttattctatttttttt

SEQ ID NO: 288255 - DNA, 20 bp, synthetic construct
  source 1..20: mol_type = other DNA
aggtcttattctattttttt

SEQ ID NO: 288256 - DNA, 20 bp, synthetic construct
  source 1..20: mol_type = other DNA
taggtcttattctatttttt

SEQ ID NO: 288257 - DNA, 20 bp, synthetic construct
  source 1..20: mol_type = other DNA
ctaggtcttattctattttt

SEQ ID NO: 288258 - DNA, 20 bp, synthetic construct
  source 1..20: mol_type = other DNA
actaggtcttattctatttt

SEQ ID NO: 288259 - DNA, 20 bp, synthetic construct
  source 1..20: mol_type = other DNA
tactaggtcttattctattt

SEQ ID NO: 288260 - DNA, 20 bp, synthetic construct
  source 1..20: mol_type = other DNA
atactaggtcttattctatt

SEQ ID NO: 288261 - DNA, 20 bp, synthetic construct
  source 1..20: mol_type = other DNA
aatactaggtcttattctat

SEQ ID NO: 288262 - DNA, 20 bp, synthetic construct
  source 1..20: mol_type = other DNA
aaatactaggtcttattcta

SEQ ID NO: 288263 - DNA, 20 bp, synthetic construct
  source 1..20: mol_type = other DNA
caaatactaggtcttattct

SEQ ID NO: 288264 - DNA, 20 bp, synthetic construct
  source 1..20: mol_type = other DNA
tcaaatactaggtcttattc

SEQ ID NO: 288265 - DNA, 20 bp, synthetic construct
  source 1..20: mol_type = other DNA
atcaaatactaggtcttatt

SEQ ID NO: 288266 - DNA, 20 bp, synthetic construct
  source 1..20: mol_type = other DNA
tatcaaatactaggtcttat

SEQ ID NO: 288267 - DNA, 20 bp, synthetic construct
  source 1..20: mol_type = other DNA
ctatcaaatactaggtctta

SEQ ID NO: 288268 - DNA, 20 bp, synthetic construct
  source 1..20: mol_type = other DNA
actatcaaatactaggtctt

SEQ ID NO: 288269 - DNA, 20 bp, synthetic construct
  source 1..20: mol_type = other DNA
cactatcaaatactaggtct

SEQ ID NO: 288270 - DNA, 20 bp, synthetic construct
  source 1..20: mol_type = other DNA
gcactatcaaatactaggtc

SEQ ID NO: 288271 - DNA, 20 bp, synthetic construct
  source 1..20: mol_type = other DNA
tgcactatcaaatactaggt

SEQ ID NO: 288272 - DNA, 20 bp, synthetic construct
  source 1..20: mol_type = other DNA
ttgcactatcaaatactagg

SEQ ID NO: 288273 - DNA, 20 bp, synthetic construct
  source 1..20: mol_type = other DNA
gttgcactatcaaatactag

SEQ ID NO: 288274 - DNA, 20 bp, synthetic construct
  source 1..20: mol_type = other DNA
tgttgcactatcaaatacta

SEQ ID NO: 288275 - DNA, 20 bp, synthetic construct
  source 1..20: mol_type = other DNA
ctgttgcactatcaaatact

SEQ ID NO: 288276 - DNA, 20 bp, synthetic construct
  source 1..20: mol_type = other DNA
cctgttgcactatcaaatac

SEQ ID NO: 288277 - DNA, 20 bp, synthetic construct
  source 1..20: mol_type = other DNA
ccctgttgcactatcaaata

SEQ ID NO: 288278 - DNA, 20 bp, synthetic construct
  source 1..20: mol_type = other DNA
accctgttgcactatcaaat

SEQ ID NO: 288279 - DNA, 20 bp, synthetic construct
  source 1..20: mol_type = other DNA
caccctgttgcactatcaaa

SEQ ID NO: 288280 - DNA, 20 bp, synthetic construct
  source 1..20: mol_type = other DNA
tcaccctgttgcactatcaa

SEQ ID NO: 288281 - DNA, 20 bp, synthetic construct
  source 1..20: mol_type = other DNA
gtcaccctgttgcactatca

SEQ ID NO: 288282 - DNA, 20 bp, synthetic construct
  source 1..20: mol_type = other DNA
agtcaccctgttgcactatc

SEQ ID NO: 288283 - DNA, 20 bp, synthetic construct
  source 1..20: mol_type = other DNA
tagtcaccctgttgcactat

SEQ ID NO: 288284 - DNA, 20 bp, synthetic construct
  source 1..20: mol_type = other DNA
atagtcaccctgttgcacta

SEQ ID NO: 288285 - DNA, 20 bp, synthetic construct
  source 1..20: mol_type = other DNA
tatagtcaccctgttgcact

SEQ ID NO: 288286 - DNA, 20 bp, synthetic construct
  source 1..20: mol_type = other DNA
ctatagtcaccctgttgcac

SEQ ID NO: 288287 - DNA, 20 bp, synthetic construct
  source 1..20: mol_type = other DNA
actatagtcaccctgttgca

SEQ ID NO: 288288 - DNA, 20 bp, synthetic construct
  source 1..20: mol_type = other DNA
gactatagtcaccctgttgc

SEQ ID NO: 288289 - DNA, 20 bp, synthetic construct
  source 1..20: mol_type = other DNA
tgactatagtcaccctgttg

SEQ ID NO: 288290 - DNA, 20 bp, synthetic construct
  source 1..20: mol_type = other DNA
ttgactatagtcaccctgtt

SEQ ID NO: 288291 - DNA, 20 bp, synthetic construct
  source 1..20: mol_type = other DNA
attgactatagtcaccctgt

SEQ ID NO: 288292 - DNA, 20 bp, synthetic construct
  source 1..20: mol_type = other DNA
tattgactatagtcaccctg

SEQ ID NO: 288293 - DNA, 20 bp, synthetic construct
  source 1..20: mol_type = other DNA
ttattgactatagtcaccct

SEQ ID NO: 288294 - DNA, 20 bp, synthetic construct
  source 1..20: mol_type = other DNA
attattgactatagtcaccc

SEQ ID NO: 288295 - DNA, 20 bp, synthetic construct
  source 1..20: mol_type = other DNA
tattattgactatagtcacc

SEQ ID NO: 288296 - DNA, 20 bp, synthetic construct
  source 1..20: mol_type = other DNA
ttattattgactatagtcac

SEQ ID NO: 288297 - DNA, 20 bp, synthetic construct
  source 1..20: mol_type = other DNA
attattattgactatagtca

SEQ ID NO: 288298 - DNA, 20 bp, synthetic construct
  source 1..20: mol_type = other DNA
aattattattgactatagtc

SEQ ID NO: 288299 - DNA, 20 bp, synthetic construct
  source 1..20: mol_type = other DNA
aaattattattgactatagt

SEQ ID NO: 288300 - DNA, 20 bp, synthetic construct
  source 1..20: mol_type = other DNA
taaattattattgactatag

SEQ ID NO: 288301 - DNA, 20 bp, synthetic construct
  source 1..20: mol_type = other DNA
ttaaattattattgactata

SEQ ID NO: 288302 - DNA, 20 bp, synthetic construct
  source 1..20: mol_type = other DNA
attaaattattattgactat

SEQ ID NO: 288303 - DNA, 20 bp, synthetic construct
  source 1..20: mol_type = other DNA
aattaaattattattgacta

SEQ ID NO: 288304 - DNA, 20 bp, synthetic construct
  source 1..20: mol_type = other DNA
caattaaattattattgact

SEQ ID NO: 288305 - DNA, 20 bp, synthetic construct
  source 1..20: mol_type = other DNA
acaattaaattattattgac

SEQ ID NO: 288306 - DNA, 20 bp, synthetic construct
  source 1..20: mol_type = other DNA
tacaattaaattattattga

SEQ ID NO: 288307 - DNA, 20 bp, synthetic construct
  source 1..20: mol_type = other DNA
gtacaattaaattattattg

SEQ ID NO: 288308 - DNA, 20 bp, synthetic construct
  source 1..20: mol_type = other DNA
tgtacaattaaattattatt

SEQ ID NO: 288309 - DNA, 20 bp, synthetic construct
  source 1..20: mol_type = other DNA
atgtacaattaaattattat

SEQ ID NO: 288310 - DNA, 20 bp, synthetic construct
  source 1..20: mol_type = other DNA
aatgtacaattaaattatta

SEQ ID NO: 288311 - DNA, 20 bp, synthetic construct
  source 1..20: mol_type = other DNA
aaatgtacaattaaattatt

SEQ ID NO: 288312 - DNA, 20 bp, synthetic construct
  source 1..20: mol_type = other DNA
taaatgtacaattaaattat

SEQ ID NO: 288313 - DNA, 20 bp, synthetic construct
  source 1..20: mol_type = other DNA
ttaaatgtacaattaaatta

SEQ ID NO: 288314 - DNA, 20 bp, synthetic construct
  source 1..20: mol_type = other DNA
tttaaatgtacaattaaatt

SEQ ID NO: 288315 - DNA, 20 bp, synthetic construct
  source 1..20: mol_type = other DNA
ttttaaatgtacaattaaat

SEQ ID NO: 288316 - DNA, 20 bp, synthetic construct
  source 1..20: mol_type = other DNA
tttttaaatgtacaattaaa

SEQ ID NO: 288317 - DNA, 20 bp, synthetic construct
  source 1..20: mol_type = other DNA
atttttaaatgtacaattaa

SEQ ID NO: 288318 - DNA, 20 bp, synthetic construct
  source 1..20: mol_type = other DNA
tatttttaaatgtacaatta

SEQ ID NO: 288319 - DNA, 20 bp, synthetic construct
  source 1..20: mol_type = other DNA
ttatttttaaatgtacaatt

SEQ ID NO: 288320 - DNA, 20 bp, synthetic construct
  source 1..20: mol_type = other DNA
gttatttttaaatgtacaat

SEQ ID NO: 288321 - DNA, 20 bp, synthetic construct
  source 1..20: mol_type = other DNA
agttatttttaaatgtacaa

SEQ ID NO: 288322 - DNA, 20 bp, synthetic construct
  source 1..20: mol_type = other DNA
tagttatttttaaatgtaca

SEQ ID NO: 288323 - DNA, 20 bp, synthetic construct
  source 1..20: mol_type = other DNA
ttagttatttttaaatgtac

SEQ ID NO: 288324 - DNA, 20 bp, synthetic construct
  source 1..20: mol_type = other DNA
tttagttatttttaaatgta

SEQ ID NO: 288325 - DNA, 20 bp, synthetic construct
  source 1..20: mol_type = other DNA
ttttagttatttttaaatgt

SEQ ID NO: 288326 - DNA, 20 bp, synthetic construct
  source 1..20: mol_type = other DNA
cttttagttatttttaaatg

SEQ ID NO: 288327 - DNA, 20 bp, synthetic construct
  source 1..20: mol_type = other DNA
tcttttagttatttttaaat

SEQ ID NO: 288328 - DNA, 20 bp, synthetic construct
  source 1..20: mol_type = other DNA
atcttttagttatttttaaa

SEQ ID NO: 288329 - DNA, 20 bp, synthetic construct
  source 1..20: mol_type = other DNA
tatcttttagttatttttaa

SEQ ID NO: 288330 - DNA, 20 bp, synthetic construct
  source 1..20: mol_type = other DNA
ctatcttttagttattttta

SEQ ID NO: 288331 - DNA, 20 bp, synthetic construct
  source 1..20: mol_type = other DNA
gctatcttttagttattttt

SEQ ID NO: 288332 - DNA, 20 bp, synthetic construct
  source 1..20: mol_type = other DNA
ggctatcttttagttatttt

SEQ ID NO: 288333 - DNA, 20 bp, synthetic construct
  source 1..20: mol_type = other DNA
cggctatcttttagttattt

SEQ ID NO: 288334 - DNA, 20 bp, synthetic construct
  source 1..20: mol_type = other DNA
ccggctatcttttagttatt

SEQ ID NO: 288335 - DNA, 20 bp, synthetic construct
  source 1..20: mol_type = other DNA
cccggctatcttttagttat

SEQ ID NO: 288336 - DNA, 20 bp, synthetic construct
  source 1..20: mol_type = other DNA
acccggctatcttttagtta

SEQ ID NO: 288337 - DNA, 20 bp, synthetic construct
  source 1..20: mol_type = other DNA
cacccggctatcttttagtt

SEQ ID NO: 288338 - DNA, 20 bp, synthetic construct
  source 1..20: mol_type = other DNA
gcacccggctatcttttagt

SEQ ID NO: 288339 - DNA, 20 bp, synthetic construct
  source 1..20: mol_type = other DNA
tgcacccggctatcttttag

SEQ ID NO: 288340 - DNA, 20 bp, synthetic construct
  source 1..20: mol_type = other DNA
ctgcacccggctatctttta

SEQ ID NO: 288341 - DNA, 20 bp, synthetic construct
  source 1..20: mol_type = other DNA
actgcacccggctatctttt

SEQ ID NO: 288342 - DNA, 20 bp, synthetic construct
  source 1..20: mol_type = other DNA
cactgcacccggctatcttt

SEQ ID NO: 288343 - DNA, 20 bp, synthetic construct
  source 1..20: mol_type = other DNA
ccactgcacccggctatctt

SEQ ID NO: 288344 - DNA, 20 bp, synthetic construct
  source 1..20: mol_type = other DNA
gccactgcacccggctatct

SEQ ID NO: 288345 - DNA, 20 bp, synthetic construct
  source 1..20: mol_type = other DNA
agccactgcacccggctatc

SEQ ID NO: 288346 - DNA, 20 bp, synthetic construct
  source 1..20: mol_type = other DNA
aagccactgcacccggctat

SEQ ID NO: 288347 - DNA, 20 bp, synthetic construct
  source 1..20: mol_type = other DNA
taagccactgcacccggcta

SEQ ID NO: 288348 - DNA, 20 bp, synthetic construct
  source 1..20: mol_type = other DNA
gtaagccactgcacccggct

SEQ ID NO: 288349 - DNA, 20 bp, synthetic construct
  source 1..20: mol_type = other DNA
cgtaagccactgcacccggc

SEQ ID NO: 288350 - DNA, 20 bp, synthetic construct
  source 1..20: mol_type = other DNA
acgtaagccactgcacccgg

SEQ ID NO: 288351 - DNA, 20 bp, synthetic construct
  source 1..20: mol_type = other DNA
gacgtaagccactgcacccg

SEQ ID NO: 288352 - DNA, 20 bp, synthetic construct
  source 1..20: mol_type = other DNA
agacgtaagccactgcaccc

SEQ ID NO: 288353 - DNA, 20 bp, synthetic construct
  source 1..20: mol_type = other DNA
cagacgtaagccactgcacc

SEQ ID NO: 288354 - DNA, 20 bp, synthetic construct
  source 1..20: mol_type = other DNA
acagacgtaagccactgcac

SEQ ID NO: 288355 - DNA, 20 bp, synthetic construct
  source 1..20: mol_type = other DNA
tacagacgtaagccactgca

SEQ ID NO: 288356 - DNA, 20 bp, synthetic construct
  source 1..20: mol_type = other DNA
ttacagacgtaagccactgc

SEQ ID NO: 288357 - DNA, 20 bp, synthetic construct
  source 1..20: mol_type = other DNA
attacagacgtaagccactg

SEQ ID NO: 288358 - DNA, 20 bp, synthetic construct
  source 1..20: mol_type = other DNA
gattacagacgtaagccact

SEQ ID NO: 288359 - DNA, 20 bp, synthetic construct
  source 1..20: mol_type = other DNA
ggattacagacgtaagccac

SEQ ID NO: 288360 - DNA, 20 bp, synthetic construct
  source 1..20: mol_type = other DNA
gggattacagacgtaagcca

SEQ ID NO: 288361 - DNA, 20 bp, synthetic construct
  source 1..20: mol_type = other DNA
tgggattacagacgtaagcc

SEQ ID NO: 288362 - DNA, 20 bp, synthetic construct
  source 1..20: mol_type = other DNA
ctgggattacagacgtaagc

SEQ ID NO: 288363 - DNA, 20 bp, synthetic construct
  source 1..20: mol_type = other DNA
actgggattacagacgtaag

SEQ ID NO: 288364 - DNA, 20 bp, synthetic construct
  source 1..20: mol_type = other DNA
tactgggattacagacgtaa

SEQ ID NO: 288365 - DNA, 20 bp, synthetic construct
  source 1..20: mol_type = other DNA
gtactgggattacagacgta

SEQ ID NO: 288366 - DNA, 20 bp, synthetic construct
  source 1..20: mol_type = other DNA
agtactgggattacagacgt

SEQ ID NO: 288367 - DNA, 20 bp, synthetic construct
  source 1..20: mol_type = other DNA
aagtactgggattacagacg

SEQ ID NO: 288368 - DNA, 20 bp, synthetic construct
  source 1..20: mol_type = other DNA
aaagtactgggattacagac

SEQ ID NO: 288369 - DNA, 20 bp, synthetic construct
  source 1..20: mol_type = other DNA
caaagtactgggattacaga

SEQ ID NO: 288370 - DNA, 20 bp, synthetic construct
  source 1..20: mol_type = other DNA
ccaaagtactgggattacag

SEQ ID NO: 288371 - DNA, 20 bp, synthetic construct
  source 1..20: mol_type = other DNA
cccaaagtactgggattaca

SEQ ID NO: 288372 - DNA, 20 bp, synthetic construct
  source 1..20: mol_type = other DNA
tcccaaagtactgggattac

SEQ ID NO: 288373 - DNA, 20 bp, synthetic construct
  source 1..20: mol_type = other DNA
ctcccaaagtactgggatta

SEQ ID NO: 288374 - DNA, 20 bp, synthetic construct
  source 1..20: mol_type = other DNA
cctcccaaagtactgggatt

SEQ ID NO: 288375 - DNA, 20 bp, synthetic construct
  source 1..20: mol_type = other DNA
gcctcccaaagtactgggat

SEQ ID NO: 288376 - DNA, 20 bp, synthetic construct
  source 1..20: mol_type = other DNA
agcctcccaaagtactggga

SEQ ID NO: 288377 - DNA, 20 bp, synthetic construct
  source 1..20: mol_type = other DNA
cagcctcccaaagtactggg

SEQ ID NO: 288378 - DNA, 20 bp, synthetic construct
  source 1..20: mol_type = other DNA
tcagcctcccaaagtactgg

SEQ ID NO: 288379 - DNA, 20 bp, synthetic construct
  source 1..20: mol_type = other DNA
ctcagcctcccaaagtactg

SEQ ID NO: 288380 - DNA, 20 bp, synthetic construct
  source 1..20: mol_type = other DNA
cctcagcctcccaaagtact

SEQ ID NO: 288381 - DNA, 20 bp, synthetic construct
  source 1..20: mol_type = other DNA
acctcagcctcccaaagtac

SEQ ID NO: 288382 - DNA, 20 bp, synthetic construct
  source 1..20: mol_type = other DNA
cacctcagcctcccaaagta

SEQ ID NO: 288383 - DNA, 20 bp, synthetic construct
  source 1..20: mol_type = other DNA
ccacctcagcctcccaaagt

SEQ ID NO: 288384 - DNA, 20 bp, synthetic construct
  source 1..20: mol_type = other DNA
cccacctcagcctcccaaag

SEQ ID NO: 288385 - DNA, 20 bp, synthetic construct
  source 1..20: mol_type = other DNA
gcccacctcagcctcccaaa

SEQ ID NO: 288386 - DNA, 20 bp, synthetic construct
  source 1..20: mol_type = other DNA
cgcccacctcagcctcccaa

SEQ ID NO: 288387 - DNA, 20 bp, synthetic construct
  source 1..20: mol_type = other DNA
acgcccacctcagcctccca

SEQ ID NO: 288388 - DNA, 20 bp, synthetic construct
  source 1..20: mol_type = other DNA
aacgcccacctcagcctccc

SEQ ID NO: 288389 - DNA, 20 bp, synthetic construct
  source 1..20: mol_type = other DNA
aaacgcccacctcagcctcc

SEQ ID NO: 288390 - DNA, 20 bp, synthetic construct
  source 1..20: mol_type = other DNA
caaacgcccacctcagcctc

SEQ ID NO: 288391 - DNA, 20 bp, synthetic construct
  source 1..20: mol_type = other DNA
tcaaacgcccacctcagcct

SEQ ID NO: 288392 - DNA, 20 bp, synthetic construct
  source 1..20: mol_type = other DNA
ctcaaacgcccacctcagcc

SEQ ID NO: 288393 - DNA, 20 bp, synthetic construct
  source 1..20: mol_type = other DNA
tctcaaacgcccacctcagc

SEQ ID NO: 288394 - DNA, 20 bp, synthetic construct
  source 1..20: mol_type = other DNA
gtctcaaacgcccacctcag

SEQ ID NO: 288395 - DNA, 20 bp, synthetic construct
  source 1..20: mol_type = other DNA
ggtctcaaacgcccacctca

SEQ ID NO: 288396 - DNA, 20 bp, synthetic construct
  source 1..20: mol_type = other DNA
tggtctcaaacgcccacctc

SEQ ID NO: 288397 - DNA, 20 bp, synthetic construct
  source 1..20: mol_type = other DNA
ctggtctcaaacgcccacct

SEQ ID NO: 288398 - DNA, 20 bp, synthetic construct
  source 1..20: mol_type = other DNA
gctggtctcaaacgcccacc

SEQ ID NO: 288399 - DNA, 20 bp, synthetic construct
  source 1..20: mol_type = other DNA
ggctggtctcaaacgcccac

SEQ ID NO: 288400 - DNA, 20 bp, synthetic construct
  source 1..20: mol_type = other DNA
aggctggtctcaaacgccca

SEQ ID NO: 288401 - DNA, 20 bp, synthetic construct
  source 1..20: mol_type = other DNA
caggctggtctcaaacgccc

SEQ ID NO: 288402 - DNA, 20 bp, synthetic construct
  source 1..20: mol_type = other DNA
ccaggctggtctcaaacgcc

SEQ ID NO: 288403 - DNA, 20 bp, synthetic construct
  source 1..20: mol_type = other DNA
gccaggctggtctcaaacgc

SEQ ID NO: 288404 - DNA, 20 bp, synthetic construct
  source 1..20: mol_type = other DNA
ggccaggctggtctcaaacg

SEQ ID NO: 288405 - DNA, 20 bp, synthetic construct
  source 1..20: mol_type = other DNA
tggccaggctggtctcaaac

SEQ ID NO: 288406 - DNA, 20 bp, synthetic construct
  source 1..20: mol_type = other DNA
ttggccaggctggtctcaaa

SEQ ID NO: 288407 - DNA, 20 bp, synthetic construct
  source 1..20: mol_type = other DNA
gttggccaggctggtctcaa

SEQ ID NO: 288408 - DNA, 20 bp, synthetic construct
  source 1..20: mol_type = other DNA
tgttggccaggctggtctca

SEQ ID NO: 288409 - DNA, 20 bp, synthetic construct
  source 1..20: mol_type = other DNA
atgttggccaggctggtctc

SEQ ID NO: 288410 - DNA, 20 bp, synthetic construct
  source 1..20: mol_type = other DNA
catgttggccaggctggtct

SEQ ID NO: 288411 - DNA, 20 bp, synthetic construct
  source 1..20: mol_type = other DNA
ccatgttggccaggctggtc

SEQ ID NO: 288412 - DNA, 20 bp, synthetic construct
  source 1..20: mol_type = other DNA
accatgttggccaggctggt

SEQ ID NO: 288413 - DNA, 20 bp, synthetic construct
  source 1..20: mol_type = other DNA
caccatgttggccaggctgg

SEQ ID NO: 288414 - DNA, 20 bp, synthetic construct
  source 1..20: mol_type = other DNA
tcaccatgttggccaggctg

SEQ ID NO: 288415 - DNA, 20 bp, synthetic construct
  source 1..20: mol_type = other DNA
ttcaccatgttggccaggct

SEQ ID NO: 288416 - DNA, 20 bp, synthetic construct
  source 1..20: mol_type = other DNA
tttcaccatgttggccaggc

SEQ ID NO: 288417 - DNA, 20 bp, synthetic construct
  source 1..20: mol_type = other DNA
gtttcaccatgttggccagg

SEQ ID NO: 288418 - DNA, 20 bp, synthetic construct
  source 1..20: mol_type = other DNA
ggtttcaccatgttggccag

SEQ ID NO: 288419 - DNA, 20 bp, synthetic construct
  source 1..20: mol_type = other DNA
gggtttcaccatgttggcca

SEQ ID NO: 288420 - DNA, 20 bp, synthetic construct
  source 1..20: mol_type = other DNA
ggggtttcaccatgttggcc

SEQ ID NO: 288421 - DNA, 20 bp, synthetic construct
  source 1..20: mol_type = other DNA
tggggtttcaccatgttggc

SEQ ID NO: 288422 - DNA, 20 bp, synthetic construct
  source 1..20: mol_type = other DNA
atggggtttcaccatgttgg

SEQ ID NO: 288423 - DNA, 20 bp, synthetic construct
  source 1..20: mol_type = other DNA
gatggggtttcaccatgttg

SEQ ID NO: 288424 - DNA, 20 bp, synthetic construct
  source 1..20: mol_type = other DNA
agatggggtttcaccatgtt

SEQ ID NO: 288425 - DNA, 20 bp, synthetic construct
  source 1..20: mol_type = other DNA
gagatggggtttcaccatgt

SEQ ID NO: 288426 - DNA, 20 bp, synthetic construct
  source 1..20: mol_type = other DNA
agagatggggtttcaccatg

SEQ ID NO: 288427 - DNA, 20 bp, synthetic construct
  source 1..20: mol_type = other DNA
tagagatggggtttcaccat

SEQ ID NO: 288428 - DNA, 20 bp, synthetic construct
  source 1..20: mol_type = other DNA
gtagagatggggtttcacca

SEQ ID NO: 288429 - DNA, 20 bp, synthetic construct
  source 1..20: mol_type = other DNA
agtagagatggggtttcacc

SEQ ID NO: 288430 - DNA, 20 bp, synthetic construct
  source 1..20: mol_type = other DNA
tagtagagatggggtttcac

SEQ ID NO: 288431 - DNA, 20 bp, synthetic construct
  source 1..20: mol_type = other DNA
ttagtagagatggggtttca

SEQ ID NO: 288432 - DNA, 20 bp, synthetic construct
  source 1..20: mol_type = other DNA
tttagtagagatggggtttc

SEQ ID NO: 288433 - DNA, 20 bp, synthetic construct
  source 1..20: mol_type = other DNA
ttttagtagagatggggttt

SEQ ID NO: 288434 - DNA, 20 bp, synthetic construct
  source 1..20: mol_type = other DNA
tttttagtagagatggggtt

SEQ ID NO: 288435 - DNA, 20 bp, synthetic construct
  source 1..20: mol_type = other DNA
atttttagtagagatggggt

SEQ ID NO: 288436 - DNA, 20 bp, synthetic construct
  source 1..20: mol_type = other DNA
tatttttagtagagatgggg

SEQ ID NO: 288437 - DNA, 20 bp, synthetic construct
  source 1..20: mol_type = other DNA
gtatttttagtagagatggg

SEQ ID NO: 288438 - DNA, 20 bp, synthetic construct
  source 1..20: mol_type = other DNA
tgtatttttagtagagatgg

SEQ ID NO: 288439 - DNA, 20 bp, synthetic construct
  source 1..20: mol_type = other DNA
ttgtatttttagtagagatg

SEQ ID NO: 288440 - DNA, 20 bp, synthetic construct
  source 1..20: mol_type = other DNA
tttgtatttttagtagagat

SEQ ID NO: 288441 - DNA, 20 bp, synthetic construct
  source 1..20: mol_type = other DNA
ttttgtatttttagtagaga

SEQ ID NO: 288442 - DNA, 20 bp, synthetic construct
  source 1..20: mol_type = other DNA
tttttgtatttttagtagag

SEQ ID NO: 288443 - DNA, 20 bp, synthetic construct
  source 1..20: mol_type = other DNA
atttttgtatttttagtaga

SEQ ID NO: 288444 - DNA, 20 bp, synthetic construct
  source 1..20: mol_type = other DNA
aatttttgtatttttagtag

SEQ ID NO: 288445 - DNA, 20 bp, synthetic construct
  source 1..20: mol_type = other DNA
taatttttgtatttttagta

SEQ ID NO: 288446 - DNA, 20 bp, synthetic construct
  source 1..20: mol_type = other DNA
ctaatttttgtatttttagt

SEQ ID NO: 288447 - DNA, 20 bp, synthetic construct
  source 1..20: mol_type = other DNA
gctaatttttgtatttttag

SEQ ID NO: 288448 - DNA, 20 bp, synthetic construct
  source 1..20: mol_type = other DNA
ggctaatttttgtattttta

SEQ ID NO: 288449 - DNA, 20 bp, synthetic construct
  source 1..20: mol_type = other DNA
tggctaatttttgtattttt

SEQ ID NO: 288450 - DNA, 20 bp, synthetic construct
  source 1..20: mol_type = other DNA
ctggctaatttttgtatttt

SEQ ID NO: 288451 - DNA, 20 bp, synthetic construct
  source 1..20: mol_type = other DNA
cctggctaatttttgtattt

SEQ ID NO: 288452 - DNA, 20 bp, synthetic construct
  source 1..20: mol_type = other DNA
gcctggctaatttttgtatt

SEQ ID NO: 288453 - DNA, 20 bp, synthetic construct
  source 1..20: mol_type = other DNA
tgcctggctaatttttgtat

SEQ ID NO: 288454 - DNA, 20 bp, synthetic construct
  source 1..20: mol_type = other DNA
atgcctggctaatttttgta

SEQ ID NO: 288455 - DNA, 20 bp, synthetic construct
  source 1..20: mol_type = other DNA
catgcctggctaatttttgt

SEQ ID NO: 288456 - DNA, 20 bp, synthetic construct
  source 1..20: mol_type = other DNA
ccatgcctggctaatttttg

SEQ ID NO: 288457 - DNA, 20 bp, synthetic construct
  source 1..20: mol_type = other DNA
accatgcctggctaattttt

SEQ ID NO: 288458 - DNA, 20 bp, synthetic construct
  source 1..20: mol_type = other DNA
caccatgcctggctaatttt

SEQ ID NO: 288459 - DNA, 20 bp, synthetic construct
  source 1..20: mol_type = other DNA
ccaccatgcctggctaattt

SEQ ID NO: 288460 - DNA, 20 bp, synthetic construct
  source 1..20: mol_type = other DNA
gccaccatgcctggctaatt

SEQ ID NO: 288461 - DNA, 20 bp, synthetic construct
  source 1..20: mol_type = other DNA
cgccaccatgcctggctaat

SEQ ID NO: 288462 - DNA, 20 bp, synthetic construct
  source 1..20: mol_type = other DNA
ccgccaccatgcctggctaa

SEQ ID NO: 288463 - DNA, 20 bp, synthetic construct
  source 1..20: mol_type = other DNA
cccgccaccatgcctggcta

SEQ ID NO: 288464 - DNA, 20 bp, synthetic construct
  source 1..20: mol_type = other DNA
gcccgccaccatgcctggct

SEQ ID NO: 288465 - DNA, 20 bp, synthetic construct
  source 1..20: mol_type = other DNA
cgcccgccaccatgcctggc

SEQ ID NO: 288466 - DNA, 20 bp, synthetic construct
  source 1..20: mol_type = other DNA
gcgcccgccaccatgcctgg

SEQ ID NO: 288467 - DNA, 20 bp, synthetic construct
  source 1..20: mol_type = other DNA
ggcgcccgccaccatgcctg

SEQ ID NO: 288468 - DNA, 20 bp, synthetic construct
  source 1..20: mol_type = other DNA
aggcgcccgccaccatgcct

SEQ ID NO: 288469 - DNA, 20 bp, synthetic construct
  source 1..20: mol_type = other DNA
caggcgcccgccaccatgcc

SEQ ID NO: 288470 - DNA, 20 bp, synthetic construct
  source 1..20: mol_type = other DNA
acaggcgcccgccaccatgc

SEQ ID NO: 288471 - DNA, 20 bp, synthetic construct
  source 1..20: mol_type = other DNA
tacaggcgcccgccaccatg

SEQ ID NO: 288472 - DNA, 20 bp, synthetic construct
  source 1..20: mol_type = other DNA
ttacaggcgcccgccaccat

SEQ ID NO: 288473 - DNA, 20 bp, synthetic construct
  source 1..20: mol_type = other DNA
attacaggcgcccgccacca

SEQ ID NO: 288474 - DNA, 20 bp, synthetic construct
  source 1..20: mol_type = other DNA
gattacaggcgcccgccacc

SEQ ID NO: 288475 - DNA, 20 bp, synthetic construct
  source 1..20: mol_type = other DNA
ggattacaggcgcccgccac

SEQ ID NO: 288476 - DNA, 20 bp, synthetic construct
  source 1..20: mol_type = other DNA
gggattacaggcgcccgcca

SEQ ID NO: 288477 - DNA, 20 bp, synthetic construct
  source 1..20: mol_type = other DNA
tgggattacaggcgcccgcc

SEQ ID NO: 288478 - DNA, 20 bp, synthetic construct
  source 1..20: mol_type = other DNA
ctgggattacaggcgcccgc

SEQ ID NO: 288479 - DNA, 20 bp, synthetic construct
  source 1..20: mol_type = other DNA
gctgggattacaggcgcccg

SEQ ID NO: 288480 - DNA, 20 bp, synthetic construct
  source 1..20: mol_type = other DNA
agctgggattacaggcgccc

SEQ ID NO: 288481 - DNA, 20 bp, synthetic construct
  source 1..20: mol_type = other DNA
tagctgggattacaggcgcc

SEQ ID NO: 288482 - DNA, 20 bp, synthetic construct
  source 1..20: mol_type = other DNA
gtagctgggattacaggcgc

SEQ ID NO: 288483 - DNA, 20 bp, synthetic construct
  source 1..20: mol_type = other DNA
agtagctgggattacaggcg

SEQ ID NO: 288484 - DNA, 20 bp, synthetic construct
  source 1..20: mol_type = other DNA
gagtagctgggattacaggc

SEQ ID NO: 288485 - DNA, 20 bp, synthetic construct
  source 1..20: mol_type = other DNA
cgagtagctgggattacagg

SEQ ID NO: 288486 - DNA, 20 bp, synthetic construct
  source 1..20: mol_type = other DNA
ccgagtagctgggattacag

SEQ ID NO: 288487 - DNA, 20 bp, synthetic construct
  source 1..20: mol_type = other DNA
cccgagtagctgggattaca

SEQ ID NO: 288488 - DNA, 20 bp, synthetic construct
  source 1..20: mol_type = other DNA
tcccgagtagctgggattac

SEQ ID NO: 288489 - DNA, 20 bp, synthetic construct
  source 1..20: mol_type = other DNA
ctcccgagtagctgggatta

SEQ ID NO: 288490 - DNA, 20 bp, synthetic construct
  source 1..20: mol_type = other DNA
cctcccgagtagctgggatt

SEQ ID NO: 288491 - DNA, 20 bp, synthetic construct
  source 1..20: mol_type = other DNA
gcctcccgagtagctgggat

SEQ ID NO: 288492 - DNA, 20 bp, synthetic construct
  source 1..20: mol_type = other DNA
agcctcccgagtagctggga

SEQ ID NO: 288493 - DNA, 20 bp, synthetic construct
  source 1..20: mol_type = other DNA
cagcctcccgagtagctggg

SEQ ID NO: 288494 - DNA, 20 bp, synthetic construct
  source 1..20: mol_type = other DNA
tcagcctcccgagtagctgg

SEQ ID NO: 288495 - DNA, 20 bp, synthetic construct
  source 1..20: mol_type = other DNA
ctcagcctcccgagtagctg

SEQ ID NO: 288496 - DNA, 20 bp, synthetic construct
  source 1..20: mol_type = other DNA
cctcagcctcccgagtagct

SEQ ID NO: 288497 - DNA, 20 bp, synthetic construct
  source 1..20: mol_type = other DNA
gcctcagcctcccgagtagc

SEQ ID NO: 288498 - DNA, 20 bp, synthetic construct
  source 1..20: mol_type = other DNA
tgcctcagcctcccgagtag

SEQ ID NO: 288499 - DNA, 20 bp, synthetic construct
  source 1..20: mol_type = other DNA
ctgcctcagcctcccgagta

SEQ ID NO: 288500 - DNA, 20 bp, synthetic construct
  source 1..20: mol_type = other DNA
cctgcctcagcctcccgagt

SEQ ID NO: 288501 - DNA, 20 bp, synthetic construct
  source 1..20: mol_type = other DNA
tcctgcctcagcctcccgag

SEQ ID NO: 288502 - DNA, 20 bp, synthetic construct
  source 1..20: mol_type = other DNA
ctcctgcctcagcctcccga

SEQ ID NO: 288503 - DNA, 20 bp, synthetic construct
  source 1..20: mol_type = other DNA
tctcctgcctcagcctcccg

SEQ ID NO: 288504 - DNA, 20 bp, synthetic construct
  source 1..20: mol_type = other DNA
ttctcctgcctcagcctccc

SEQ ID NO: 288505 - DNA, 20 bp, synthetic construct
  source 1..20: mol_type = other DNA
attctcctgcctcagcctcc

SEQ ID NO: 288506 - DNA, 20 bp, synthetic construct
  source 1..20: mol_type = other DNA
gattctcctgcctcagcctc

SEQ ID NO: 288507 - DNA, 20 bp, synthetic construct
  source 1..20: mol_type = other DNA
tgattctcctgcctcagcct

SEQ ID NO: 288508 - DNA, 20 bp, synthetic construct
  source 1..20: mol_type = other DNA
gtgattctcctgcctcagcc

SEQ ID NO: 288509 - DNA, 20 bp, synthetic construct
  source 1..20: mol_type = other DNA
agtgattctcctgcctcagc

SEQ ID NO: 288510 - DNA, 20 bp, synthetic construct
  source 1..20: mol_type = other DNA
aagtgattctcctgcctcag

SEQ ID NO: 288511 - DNA, 20 bp, synthetic construct
  source 1..20: mol_type = other DNA
caagtgattctcctgcctca

SEQ ID NO: 288512 - DNA, 20 bp, synthetic construct
  source 1..20: mol_type = other DNA
tcaagtgattctcctgcctc

SEQ ID NO: 288513 - DNA, 20 bp, synthetic construct
  source 1..20: mol_type = other DNA
ttcaagtgattctcctgcct

SEQ ID NO: 288514 - DNA, 20 bp, synthetic construct
  source 1..20: mol_type = other DNA
gttcaagtgattctcctgcc

SEQ ID NO: 288515 - DNA, 20 bp, synthetic construct
  source 1..20: mol_type = other DNA
ggttcaagtgattctcctgc

SEQ ID NO: 288516 - DNA, 20 bp, synthetic construct
  source 1..20: mol_type = other DNA
aggttcaagtgattctcctg

SEQ ID NO: 288517 - DNA, 20 bp, synthetic construct
  source 1..20: mol_type = other DNA
caggttcaagtgattctcct

SEQ ID NO: 288518 - DNA, 20 bp, synthetic construct
  source 1..20: mol_type = other DNA
ccaggttcaagtgattctcc

SEQ ID NO: 288519 - DNA, 20 bp, synthetic construct
  source 1..20: mol_type = other DNA
cccaggttcaagtgattctc

SEQ ID NO: 288520 - DNA, 20 bp, synthetic construct
  source 1..20: mol_type = other DNA
tcccaggttcaagtgattct

SEQ ID NO: 288521 - DNA, 20 bp, synthetic construct
  source 1..20: mol_type = other DNA
ctcccaggttcaagtgattc

SEQ ID NO: 288522 - DNA, 20 bp, synthetic construct
  source 1..20: mol_type = other DNA
cctcccaggttcaagtgatt

SEQ ID NO: 288523 - DNA, 20 bp, synthetic construct
  source 1..20: mol_type = other DNA
gcctcccaggttcaagtgat

SEQ ID NO: 288524 - DNA, 20 bp, synthetic construct
  source 1..20: mol_type = other DNA
tgcctcccaggttcaagtga

SEQ ID NO: 288525 - DNA, 20 bp, synthetic construct
  source 1..20: mol_type = other DNA
ctgcctcccaggttcaagtg

SEQ ID NO: 288526 - DNA, 20 bp, synthetic construct
  source 1..20: mol_type = other DNA
tctgcctcccaggttcaagt

SEQ ID NO: 288527 - DNA, 20 bp, synthetic construct
  source 1..20: mol_type = other DNA
ctctgcctcccaggttcaag

SEQ ID NO: 288528 - DNA, 20 bp, synthetic construct
  source 1..20: mol_type = other DNA
cctctgcctcccaggttcaa

SEQ ID NO: 288529 - DNA, 20 bp, synthetic construct
  source 1..20: mol_type = other DNA
acctctgcctcccaggttca

SEQ ID NO: 288530 - DNA, 20 bp, synthetic construct
  source 1..20: mol_type = other DNA
aacctctgcctcccaggttc

SEQ ID NO: 288531 - DNA, 20 bp, synthetic construct
  source 1..20: mol_type = other DNA
caacctctgcctcccaggtt

SEQ ID NO: 288532 - DNA, 20 bp, synthetic construct
  source 1..20: mol_type = other DNA
gcaacctctgcctcccaggt

SEQ ID NO: 288533 - DNA, 20 bp, synthetic construct
  source 1..20: mol_type = other DNA
tgcaacctctgcctcccagg

SEQ ID NO: 288534 - DNA, 20 bp, synthetic construct
  source 1..20: mol_type = other DNA
ctgcaacctctgcctcccag

SEQ ID NO: 288535 - DNA, 20 bp, synthetic construct
  source 1..20: mol_type = other DNA
actgcaacctctgcctccca

SEQ ID NO: 288536 - DNA, 20 bp, synthetic construct
  source 1..20: mol_type = other DNA
cactgcaacctctgcctccc

SEQ ID NO: 288537 - DNA, 20 bp, synthetic construct
  source 1..20: mol_type = other DNA
tcactgcaacctctgcctcc

SEQ ID NO: 288538 - DNA, 20 bp, synthetic construct
  source 1..20: mol_type = other DNA
ctcactgcaacctctgcctc

SEQ ID NO: 288539 - DNA, 20 bp, synthetic construct
  source 1..20: mol_type = other DNA
gctcactgcaacctctgcct

SEQ ID NO: 288540 - DNA, 20 bp, synthetic construct
  source 1..20: mol_type = other DNA
ggctcactgcaacctctgcc

SEQ ID NO: 288541 - DNA, 20 bp, synthetic construct
  source 1..20: mol_type = other DNA
cggctcactgcaacctctgc

SEQ ID NO: 288542 - DNA, 20 bp, synthetic construct
  source 1..20: mol_type = other DNA
tcggctcactgcaacctctg

SEQ ID NO: 288543 - DNA, 20 bp, synthetic construct
  source 1..20: mol_type = other DNA
ctcggctcactgcaacctct

SEQ ID NO: 288544 - DNA, 20 bp, synthetic construct
  source 1..20: mol_type = other DNA
tctcggctcactgcaacctc

SEQ ID NO: 288545 - DNA, 20 bp, synthetic construct
  source 1..20: mol_type = other DNA
atctcggctcactgcaacct

SEQ ID NO: 288546 - DNA, 20 bp, synthetic construct
  source 1..20: mol_type = other DNA
gatctcggctcactgcaacc

SEQ ID NO: 288547 - DNA, 20 bp, synthetic construct
  source 1..20: mol_type = other DNA
agatctcggctcactgcaac

SEQ ID NO: 288548 - DNA, 20 bp, synthetic construct
  source 1..20: mol_type = other DNA
aagatctcggctcactgcaa

SEQ ID NO: 288549 - DNA, 20 bp, synthetic construct
  source 1..20: mol_type = other DNA
caagatctcggctcactgca

SEQ ID NO: 288550 - DNA, 20 bp, synthetic construct
  source 1..20: mol_type = other DNA
gcaagatctcggctcactgc

SEQ ID NO: 288551 - DNA, 20 bp, synthetic construct
  source 1..20: mol_type = other DNA
ggcaagatctcggctcactg

SEQ ID NO: 288552 - DNA, 20 bp, synthetic construct
  source 1..20: mol_type = other DNA
tggcaagatctcggctcact

SEQ ID NO: 288553 - DNA, 20 bp, synthetic construct
  source 1..20: mol_type = other DNA
gtggcaagatctcggctcac

SEQ ID NO: 288554 - DNA, 20 bp, synthetic construct
  source 1..20: mol_type = other DNA
agtggcaagatctcggctca

SEQ ID NO: 288555 - DNA, 20 bp, synthetic construct
  source 1..20: mol_type = other DNA
cagtggcaagatctcggctc

SEQ ID NO: 288556 - DNA, 20 bp, synthetic construct
  source 1..20: mol_type = other DNA
gcagtggcaagatctcggct

SEQ ID NO: 288557 - DNA, 20 bp, synthetic construct
  source 1..20: mol_type = other DNA
tgcagtggcaagatctcggc

SEQ ID NO: 288558 - DNA, 20 bp, synthetic construct
  source 1..20: mol_type = other DNA
gtgcagtggcaagatctcgg

SEQ ID NO: 288559 - DNA, 20 bp, synthetic construct
  source 1..20: mol_type = other DNA
agtgcagtggcaagatctcg

SEQ ID NO: 288560 - DNA, 20 bp, synthetic construct
  source 1..20: mol_type = other DNA
gagtgcagtggcaagatctc

SEQ ID NO: 288561 - DNA, 20 bp, synthetic construct
  source 1..20: mol_type = other DNA
ggagtgcagtggcaagatct

SEQ ID NO: 288562 - DNA, 20 bp, synthetic construct
  source 1..20: mol_type = other DNA
tggagtgcagtggcaagatc

SEQ ID NO: 288563 - DNA, 20 bp, synthetic construct
  source 1..20: mol_type = other DNA
ctggagtgcagtggcaagat

SEQ ID NO: 288564 - DNA, 20 bp, synthetic construct
  source 1..20: mol_type = other DNA
gctggagtgcagtggcaaga

SEQ ID NO: 288565 - DNA, 20 bp, synthetic construct
  source 1..20: mol_type = other DNA
ggctggagtgcagtggcaag

SEQ ID NO: 288566 - DNA, 20 bp, synthetic construct
  source 1..20: mol_type = other DNA
aggctggagtgcagtggcaa

SEQ ID NO: 288567 - DNA, 20 bp, synthetic construct
  source 1..20: mol_type = other DNA
caggctggagtgcagtggca

SEQ ID NO: 288568 - DNA, 20 bp, synthetic construct
  source 1..20: mol_type = other DNA
ccaggctggagtgcagtggc

SEQ ID NO: 288569 - DNA, 20 bp, synthetic construct
  source 1..20: mol_type = other DNA
cccaggctggagtgcagtgg

SEQ ID NO: 288570 - DNA, 20 bp, synthetic construct
  source 1..20: mol_type = other DNA
acccaggctggagtgcagtg

SEQ ID NO: 288571 - DNA, 20 bp, synthetic construct
  source 1..20: mol_type = other DNA
cacccaggctggagtgcagt

SEQ ID NO: 288572 - DNA, 20 bp, synthetic construct
  source 1..20: mol_type = other DNA
tcacccaggctggagtgcag

SEQ ID NO: 288573 - DNA, 20 bp, synthetic construct
  source 1..20: mol_type = other DNA
gtcacccaggctggagtgca

SEQ ID NO: 288574 - DNA, 20 bp, synthetic construct
  source 1..20: mol_type = other DNA
tgtcacccaggctggagtgc

SEQ ID NO: 288575 - DNA, 20 bp, synthetic construct
  source 1..20: mol_type = other DNA
ctgtcacccaggctggagtg

SEQ ID NO: 288576 - DNA, 20 bp, synthetic construct
  source 1..20: mol_type = other DNA
actgtcacccaggctggagt

SEQ ID NO: 288577 - DNA, 20 bp, synthetic construct
  source 1..20: mol_type = other DNA
cactgtcacccaggctggag

SEQ ID NO: 288578 - DNA, 20 bp, synthetic construct
  source 1..20: mol_type = other DNA
tcactgtcacccaggctgga

SEQ ID NO: 288579 - DNA, 20 bp, synthetic construct
  source 1..20: mol_type = other DNA
ttcactgtcacccaggctgg

SEQ ID NO: 288580 - DNA, 20 bp, synthetic construct
  source 1..20: mol_type = other DNA
tttcactgtcacccaggctg

SEQ ID NO: 288581 - DNA, 20 bp, synthetic construct
  source 1..20: mol_type = other DNA
gtttcactgtcacccaggct

SEQ ID NO: 288582 - DNA, 20 bp, synthetic construct
  source 1..20: mol_type = other DNA
agtttcactgtcacccaggc

SEQ ID NO: 288583 - DNA, 20 bp, synthetic construct
  source 1..20: mol_type = other DNA
gagtttcactgtcacccagg

SEQ ID NO: 288584 - DNA, 20 bp, synthetic construct
  source 1..20: mol_type = other DNA
ggagtttcactgtcacccag

SEQ ID NO: 288585 - DNA, 20 bp, synthetic construct
  source 1..20: mol_type = other DNA
cggagtttcactgtcaccca

SEQ ID NO: 288586 - DNA, 20 bp, synthetic construct
  source 1..20: mol_type = other DNA
acggagtttcactgtcaccc

SEQ ID NO: 288587 - DNA, 20 bp, synthetic construct
  source 1..20: mol_type = other DNA
gacggagtttcactgtcacc

SEQ ID NO: 288588 - DNA, 20 bp, synthetic construct
  source 1..20: mol_type = other DNA
agacggagtttcactgtcac

SEQ ID NO: 288589 - DNA, 20 bp, synthetic construct
  source 1..20: mol_type = other DNA
gagacggagtttcactgtca

SEQ ID NO: 288590 - DNA, 20 bp, synthetic construct
  source 1..20: mol_type = other DNA
tgagacggagtttcactgtc

SEQ ID NO: 288591 - DNA, 20 bp, synthetic construct
  source 1..20: mol_type = other DNA
ttgagacggagtttcactgt

SEQ ID NO: 288592 - DNA, 20 bp, synthetic construct
  source 1..20: mol_type = other DNA
tttgagacggagtttcactg

SEQ ID NO: 288593 - DNA, 20 bp, synthetic construct
  source 1..20: mol_type = other DNA
ttttgagacggagtttcact

SEQ ID NO: 288594 - DNA, 20 bp, synthetic construct
  source 1..20: mol_type = other DNA
tttttgagacggagtttcac

SEQ ID NO: 288595 - DNA, 20 bp, synthetic construct
  source 1..20: mol_type = other DNA
atttttgagacggagtttca

SEQ ID NO: 288596 - DNA, 20 bp, synthetic construct
  source 1..20: mol_type = other DNA
tatttttgagacggagtttc

SEQ ID NO: 288597 - DNA, 20 bp, synthetic construct
  source 1..20: mol_type = other DNA
ttatttttgagacggagttt

SEQ ID NO: 288598 - DNA, 20 bp, synthetic construct
  source 1..20: mol_type = other DNA
tttatttttgagacggagtt

SEQ ID NO: 288599 - DNA, 20 bp, synthetic construct
  source 1..20: mol_type = other DNA
ttttatttttgagacggagt

SEQ ID NO: 288600 - DNA, 20 bp, synthetic construct
  source 1..20: mol_type = other DNA
tttttatttttgagacggag

SEQ ID NO: 288601 - DNA, 20 bp, synthetic construct
  source 1..20: mol_type = other DNA
atttttatttttgagacgga

SEQ ID NO: 288602 - DNA, 20 bp, synthetic construct
  source 1..20: mol_type = other DNA
tatttttatttttgagacgg

SEQ ID NO: 288603 - DNA, 20 bp, synthetic construct
  source 1..20: mol_type = other DNA
ttatttttatttttgagacg

SEQ ID NO: 288604 - DNA, 20 bp, synthetic construct
  source 1..20: mol_type = other DNA
tttatttttatttttgagac

SEQ ID NO: 288605 - DNA, 20 bp, synthetic construct
  source 1..20: mol_type = other DNA
ttttatttttatttttgaga

SEQ ID NO: 288606 - DNA, 20 bp, synthetic construct
  source 1..20: mol_type = other DNA
tttttatttttatttttgag

SEQ ID NO: 288607 - DNA, 20 bp, synthetic construct
  source 1..20: mol_type = other DNA
atttttatttttatttttga

SEQ ID NO: 288608 - DNA, 20 bp, synthetic construct
  source 1..20: mol_type = other DNA
tatttttatttttatttttg

SEQ ID NO: 288609 - DNA, 20 bp, synthetic construct
  source 1..20: mol_type = other DNA
gtatttttatttttattttt

SEQ ID NO: 288610 - DNA, 20 bp, synthetic construct
  source 1..20: mol_type = other DNA
tgtatttttatttttatttt

SEQ ID NO: 288611 - DNA, 20 bp, synthetic construct
  source 1..20: mol_type = other DNA
ctgtatttttatttttattt

SEQ ID NO: 288612 - DNA, 20 bp, synthetic construct
  source 1..20: mol_type = other DNA
gctgtatttttatttttatt

SEQ ID NO: 288613 - DNA, 20 bp, synthetic construct
  source 1..20: mol_type = other DNA
agctgtatttttatttttat

SEQ ID NO: 288614 - DNA, 20 bp, synthetic construct
  source 1..20: mol_type = other DNA
cagctgtatttttattttta

SEQ ID NO: 288615 - DNA, 20 bp, synthetic construct
  source 1..20: mol_type = other DNA
ccagctgtatttttattttt

SEQ ID NO: 288616 - DNA, 20 bp, synthetic construct
  source 1..20: mol_type = other DNA
cccagctgtatttttatttt

SEQ ID NO: 288617 - DNA, 20 bp, synthetic construct
  source 1..20: mol_type = other DNA
gcccagctgtatttttattt

SEQ ID NO: 288618 - DNA, 20 bp, synthetic construct
  source 1..20: mol_type = other DNA
tgcccagctgtatttttatt

SEQ ID NO: 288619 - DNA, 20 bp, synthetic construct
  source 1..20: mol_type = other DNA
gtgcccagctgtatttttat

SEQ ID NO: 288620 - DNA, 20 bp, synthetic construct
  source 1..20: mol_type = other DNA
cgtgcccagctgtattttta

SEQ ID NO: 288621 - DNA, 20 bp, synthetic construct
  source 1..20: mol_type = other DNA
ccgtgcccagctgtattttt

SEQ ID NO: 288622 - DNA, 20 bp, synthetic construct
  source 1..20: mol_type = other DNA
accgtgcccagctgtatttt

SEQ ID NO: 288623 - DNA, 20 bp, synthetic construct
  source 1..20: mol_type = other DNA
caccgtgcccagctgtattt

SEQ ID NO: 288624 - DNA, 20 bp, synthetic construct
  source 1..20: mol_type = other DNA
ccaccgtgcccagctgtatt

SEQ ID NO: 288625 - DNA, 20 bp, synthetic construct
  source 1..20: mol_type = other DNA
gccaccgtgcccagctgtat

SEQ ID NO: 288626 - DNA, 20 bp, synthetic construct
  source 1..20: mol_type = other DNA
agccaccgtgcccagctgta

SEQ ID NO: 288627 - DNA, 20 bp, synthetic construct
  source 1..20: mol_type = other DNA
gagccaccgtgcccagctgt

SEQ ID NO: 288628 - DNA, 20 bp, synthetic construct
  source 1..20: mol_type = other DNA
tgagccaccgtgcccagctg

SEQ ID NO: 288629 - DNA, 20 bp, synthetic construct
  source 1..20: mol_type = other DNA
gtgagccaccgtgcccagct

SEQ ID NO: 288630 - DNA, 20 bp, synthetic construct
  source 1..20: mol_type = other DNA
cgtgagccaccgtgcccagc

SEQ ID NO: 288631 - DNA, 20 bp, synthetic construct
  source 1..20: mol_type = other DNA
gcgtgagccaccgtgcccag

SEQ ID NO: 288632 - DNA, 20 bp, synthetic construct
  source 1..20: mol_type = other DNA
ggcgtgagccaccgtgccca

SEQ ID NO: 288633 - DNA, 20 bp, synthetic construct
  source 1..20: mol_type = other DNA
aggcgtgagccaccgtgccc

SEQ ID NO: 288634 - DNA, 20 bp, synthetic construct
  source 1..20: mol_type = other DNA
caggcgtgagccaccgtgcc

SEQ ID NO: 288635 - DNA, 20 bp, synthetic construct
  source 1..20: mol_type = other DNA
acaggcgtgagccaccgtgc

SEQ ID NO: 288636 - DNA, 20 bp, synthetic construct
  source 1..20: mol_type = other DNA
tacaggcgtgagccaccgtg

SEQ ID NO: 288637 - DNA, 20 bp, synthetic construct
  source 1..20: mol_type = other DNA
ttacaggcgtgagccaccgt

SEQ ID NO: 288638 - DNA, 20 bp, synthetic construct
  source 1..20: mol_type = other DNA
attacaggcgtgagccaccg

SEQ ID NO: 288639 - DNA, 20 bp, synthetic construct
  source 1..20: mol_type = other DNA
gattacaggcgtgagccacc

SEQ ID NO: 288640 - DNA, 20 bp, synthetic construct
  source 1..20: mol_type = other DNA
ggattacaggcgtgagccac

SEQ ID NO: 288641 - DNA, 20 bp, synthetic construct
  source 1..20: mol_type = other DNA
gggattacaggcgtgagcca

SEQ ID NO: 288642 - DNA, 20 bp, synthetic construct
  source 1..20: mol_type = other DNA
tgggattacaggcgtgagcc

SEQ ID NO: 288643 - DNA, 20 bp, synthetic construct
  source 1..20: mol_type = other DNA
ctgggattacaggcgtgagc

SEQ ID NO: 288644 - DNA, 20 bp, synthetic construct
  source 1..20: mol_type = other DNA
gctgggattacaggcgtgag

SEQ ID NO: 288645 - DNA, 20 bp, synthetic construct
  source 1..20: mol_type = other DNA
tgctgggattacaggcgtga

SEQ ID NO: 288646 - DNA, 20 bp, synthetic construct
  source 1..20: mol_type = other DNA
gtgctgggattacaggcgtg

SEQ ID NO: 288647 - DNA, 20 bp, synthetic construct
  source 1..20: mol_type = other DNA
agtgctgggattacaggcgt

SEQ ID NO: 288648 - DNA, 20 bp, synthetic construct
  source 1..20: mol_type = other DNA
aagtgctgggattacaggcg

SEQ ID NO: 288649 - DNA, 20 bp, synthetic construct
  source 1..20: mol_type = other DNA
aaagtgctgggattacaggc

SEQ ID NO: 288650 - DNA, 20 bp, synthetic construct
  source 1..20: mol_type = other DNA
caaagtgctgggattacagg

SEQ ID NO: 288651 - DNA, 20 bp, synthetic construct
  source 1..20: mol_type = other DNA
ccaaagtgctgggattacag

SEQ ID NO: 288652 - DNA, 20 bp, synthetic construct
  source 1..20: mol_type = other DNA
cccaaagtgctgggattaca

SEQ ID NO: 288653 - DNA, 20 bp, synthetic construct
  source 1..20: mol_type = other DNA
tcccaaagtgctgggattac

SEQ ID NO: 288654 - DNA, 20 bp, synthetic construct
  source 1..20: mol_type = other DNA
ctcccaaagtgctgggatta

SEQ ID NO: 288655 - DNA, 20 bp, synthetic construct
  source 1..20: mol_type = other DNA
cctcccaaagtgctgggatt

SEQ ID NO: 288656 - DNA, 20 bp, synthetic construct
  source 1..20: mol_type = other DNA
gcctcccaaagtgctgggat

SEQ ID NO: 288657 - DNA, 20 bp, synthetic construct
  source 1..20: mol_type = other DNA
ggcctcccaaagtgctggga

SEQ ID NO: 288658 - DNA, 20 bp, synthetic construct
  source 1..20: mol_type = other DNA
cggcctcccaaagtgctggg

SEQ ID NO: 288659 - DNA, 20 bp, synthetic construct
  source 1..20: mol_type = other DNA
tcggcctcccaaagtgctgg

SEQ ID NO: 288660 - DNA, 20 bp, synthetic construct
  source 1..20: mol_type = other DNA
ctcggcctcccaaagtgctg

SEQ ID NO: 288661 - DNA, 20 bp, synthetic construct
  source 1..20: mol_type = other DNA
cctcggcctcccaaagtgct

SEQ ID NO: 288662 - DNA, 20 bp, synthetic construct
  source 1..20: mol_type = other DNA
gcctcggcctcccaaagtgc

SEQ ID NO: 288663 - DNA, 20 bp, synthetic construct
  source 1..20: mol_type = other DNA
cgcctcggcctcccaaagtg

SEQ ID NO: 288664 - DNA, 20 bp, synthetic construct
  source 1..20: mol_type = other DNA
tcgcctcggcctcccaaagt

SEQ ID NO: 288665 - DNA, 20 bp, synthetic construct
  source 1..20: mol_type = other DNA
ctcgcctcggcctcccaaag

SEQ ID NO: 288666 - DNA, 20 bp, synthetic construct
  source 1..20: mol_type = other DNA
gctcgcctcggcctcccaaa

SEQ ID NO: 288667 - DNA, 20 bp, synthetic construct
  source 1..20: mol_type = other DNA
cgctcgcctcggcctcccaa

SEQ ID NO: 288668 - DNA, 20 bp, synthetic construct
  source 1..20: mol_type = other DNA
ccgctcgcctcggcctccca

SEQ ID NO: 288669 - DNA, 20 bp, synthetic construct
  source 1..20: mol_type = other DNA
tccgctcgcctcggcctccc

SEQ ID NO: 288670 - DNA, 20 bp, synthetic construct
  source 1..20: mol_type = other DNA
atccgctcgcctcggcctcc

SEQ ID NO: 288671 - DNA, 20 bp, synthetic construct
  source 1..20: mol_type = other DNA
gatccgctcgcctcggcctc

SEQ ID NO: 288672 - DNA, 20 bp, synthetic construct
  source 1..20: mol_type = other DNA
tgatccgctcgcctcggcct

SEQ ID NO: 288673 - DNA, 20 bp, synthetic construct
  source 1..20: mol_type = other DNA
gtgatccgctcgcctcggcc

SEQ ID NO: 288674 - DNA, 20 bp, synthetic construct
  source 1..20: mol_type = other DNA
tgtgatccgctcgcctcggc

SEQ ID NO: 288675 - DNA, 20 bp, synthetic construct
  source 1..20: mol_type = other DNA
ttgtgatccgctcgcctcgg

SEQ ID NO: 288676 - DNA, 20 bp, synthetic construct
  source 1..20: mol_type = other DNA
cttgtgatccgctcgcctcg

SEQ ID NO: 288677 - DNA, 20 bp, synthetic construct
  source 1..20: mol_type = other DNA
ccttgtgatccgctcgcctc

SEQ ID NO: 288678 - DNA, 20 bp, synthetic construct
  source 1..20: mol_type = other DNA
accttgtgatccgctcgcct

SEQ ID NO: 288679 - DNA, 20 bp, synthetic construct
  source 1..20: mol_type = other DNA
gaccttgtgatccgctcgcc

SEQ ID NO: 288680 - DNA, 20 bp, synthetic construct
  source 1..20: mol_type = other DNA
tgaccttgtgatccgctcgc

SEQ ID NO: 288681 - DNA, 20 bp, synthetic construct
  source 1..20: mol_type = other DNA
ctgaccttgtgatccgctcg

SEQ ID NO: 288682 - DNA, 20 bp, synthetic construct
  source 1..20: mol_type = other DNA
cctgaccttgtgatccgctc

SEQ ID NO: 288683 - DNA, 20 bp, synthetic construct
  source 1..20: mol_type = other DNA
tcctgaccttgtgatccgct

SEQ ID NO: 288684 - DNA, 20 bp, synthetic construct
  source 1..20: mol_type = other DNA
ctcctgaccttgtgatccgc

SEQ ID NO: 288685 - DNA, 20 bp, synthetic construct
  source 1..20: mol_type = other DNA
tctcctgaccttgtgatccg

SEQ ID NO: 288686 - DNA, 20 bp, synthetic construct
  source 1..20: mol_type = other DNA
atctcctgaccttgtgatcc

SEQ ID NO: 288687 - DNA, 20 bp, synthetic construct
  source 1..20: mol_type = other DNA
tatctcctgaccttgtgatc

SEQ ID NO: 288688 - DNA, 20 bp, synthetic construct
  source 1..20: mol_type = other DNA
atatctcctgaccttgtgat

SEQ ID NO: 288689 - DNA, 20 bp, synthetic construct
  source 1..20: mol_type = other DNA
tatatctcctgaccttgtga

SEQ ID NO: 288690 - DNA, 20 bp, synthetic construct
  source 1..20: mol_type = other DNA
ctatatctcctgaccttgtg

SEQ ID NO: 288691 - DNA, 20 bp, synthetic construct
  source 1..20: mol_type = other DNA
tctatatctcctgaccttgt

SEQ ID NO: 288692 - DNA, 20 bp, synthetic construct
  source 1..20: mol_type = other DNA
gtctatatctcctgaccttg

SEQ ID NO: 288693 - DNA, 20 bp, synthetic construct
  source 1..20: mol_type = other DNA
ggtctatatctcctgacctt

SEQ ID NO: 288694 - DNA, 20 bp, synthetic construct
  source 1..20: mol_type = other DNA
tggtctatatctcctgacct

SEQ ID NO: 288695 - DNA, 20 bp, synthetic construct
  source 1..20: mol_type = other DNA
atggtctatatctcctgacc

SEQ ID NO: 288696 - DNA, 20 bp, synthetic construct
  source 1..20: mol_type = other DNA
gatggtctatatctcctgac

SEQ ID NO: 288697 - DNA, 20 bp, synthetic construct
  source 1..20: mol_type = other DNA
ggatggtctatatctcctga

SEQ ID NO: 288698 - DNA, 20 bp, synthetic construct
  source 1..20: mol_type = other DNA
aggatggtctatatctcctg

SEQ ID NO: 288699 - DNA, 20 bp, synthetic construct
  source 1..20: mol_type = other DNA
caggatggtctatatctcct

SEQ ID NO: 288700 - DNA, 20 bp, synthetic construct
  source 1..20: mol_type = other DNA
ccaggatggtctatatctcc

SEQ ID NO: 288701 - DNA, 20 bp, synthetic construct
  source 1..20: mol_type = other DNA
gccaggatggtctatatctc

SEQ ID NO: 288702 - DNA, 20 bp, synthetic construct
  source 1..20: mol_type = other DNA
agccaggatggtctatatct

SEQ ID NO: 288703 - DNA, 20 bp, synthetic construct
  source 1..20: mol_type = other DNA
tagccaggatggtctatatc

SEQ ID NO: 288704 - DNA, 20 bp, synthetic construct
  source 1..20: mol_type = other DNA
ttagccaggatggtctatat

SEQ ID NO: 288705 - DNA, 20 bp, synthetic construct
  source 1..20: mol_type = other DNA
gttagccaggatggtctata

SEQ ID NO: 288706 - DNA, 20 bp, synthetic construct
  source 1..20: mol_type = other DNA
tgttagccaggatggtctat

SEQ ID NO: 288707 - DNA, 20 bp, synthetic construct
  source 1..20: mol_type = other DNA
gtgttagccaggatggtcta

SEQ ID NO: 288708 - DNA, 20 bp, synthetic construct
  source 1..20: mol_type = other DNA
cgtgttagccaggatggtct

SEQ ID NO: 288709 - DNA, 20 bp, synthetic construct
  source 1..20: mol_type = other DNA
ccgtgttagccaggatggtc

SEQ ID NO: 288710 - DNA, 20 bp, synthetic construct
  source 1..20: mol_type = other DNA
accgtgttagccaggatggt

SEQ ID NO: 288711 - DNA, 20 bp, synthetic construct
  source 1..20: mol_type = other DNA
caccgtgttagccaggatgg

SEQ ID NO: 288712 - DNA, 20 bp, synthetic construct
  source 1..20: mol_type = other DNA
tcaccgtgttagccaggatg

SEQ ID NO: 288713 - DNA, 20 bp, synthetic construct
  source 1..20: mol_type = other DNA
ttcaccgtgttagccaggat

SEQ ID NO: 288714 - DNA, 20 bp, synthetic construct
  source 1..20: mol_type = other DNA
tttcaccgtgttagccagga

SEQ ID NO: 288715 - DNA, 20 bp, synthetic construct
  source 1..20: mol_type = other DNA
gtttcaccgtgttagccagg

SEQ ID NO: 288716 - DNA, 20 bp, synthetic construct
  source 1..20: mol_type = other DNA
ggtttcaccgtgttagccag

SEQ ID NO: 288717 - DNA, 20 bp, synthetic construct
  source 1..20: mol_type = other DNA
gggtttcaccgtgttagcca

SEQ ID NO: 288718 - DNA, 20 bp, synthetic construct
  source 1..20: mol_type = other DNA
cgggtttcaccgtgttagcc

SEQ ID NO: 288719 - DNA, 20 bp, synthetic construct
  source 1..20: mol_type = other DNA
ccgggtttcaccgtgttagc

SEQ ID NO: 288720 - DNA, 20 bp, synthetic construct
  source 1..20: mol_type = other DNA
accgggtttcaccgtgttag

SEQ ID NO: 288721 - DNA, 20 bp, synthetic construct
  source 1..20: mol_type = other DNA
gaccgggtttcaccgtgtta

SEQ ID NO: 288722 - DNA, 20 bp, synthetic construct
  source 1..20: mol_type = other DNA
agaccgggtttcaccgtgtt

SEQ ID NO: 288723 - DNA, 20 bp, synthetic construct
  source 1..20: mol_type = other DNA
gagaccgggtttcaccgtgt

SEQ ID NO: 288724 - DNA, 20 bp, synthetic construct
  source 1..20: mol_type = other DNA
agagaccgggtttcaccgtg

SEQ ID NO: 288725 - DNA, 20 bp, synthetic construct
  source 1..20: mol_type = other DNA
tagagaccgggtttcaccgt

SEQ ID NO: 288726 - DNA, 20 bp, synthetic construct
  source 1..20: mol_type = other DNA
gtagagaccgggtttcaccg

SEQ ID NO: 288727 - DNA, 20 bp, synthetic construct
  source 1..20: mol_type = other DNA
agtagagaccgggtttcacc

SEQ ID NO: 288728 - DNA, 20 bp, synthetic construct
  source 1..20: mol_type = other DNA
tagtagagaccgggtttcac

SEQ ID NO: 288729 - DNA, 20 bp, synthetic construct
  source 1..20: mol_type = other DNA
ttagtagagaccgggtttca

SEQ ID NO: 288730 - DNA, 20 bp, synthetic construct
  source 1..20: mol_type = other DNA
tttagtagagaccgggtttc

SEQ ID NO: 288731 - DNA, 20 bp, synthetic construct
  source 1..20: mol_type = other DNA
ttttagtagagaccgggttt

SEQ ID NO: 288732 - DNA, 20 bp, synthetic construct
  source 1..20: mol_type = other DNA
tttttagtagagaccgggtt

SEQ ID NO: 288733 - DNA, 20 bp, synthetic construct
  source 1..20: mol_type = other DNA
atttttagtagagaccgggt

SEQ ID NO: 288734 - DNA, 20 bp, synthetic construct
  source 1..20: mol_type = other DNA
tatttttagtagagaccggg

SEQ ID NO: 288735 - DNA, 20 bp, synthetic construct
  source 1..20: mol_type = other DNA
gtatttttagtagagaccgg

SEQ ID NO: 288736 - DNA, 20 bp, synthetic construct
  source 1..20: mol_type = other DNA
tgtatttttagtagagaccg

SEQ ID NO: 288737 - DNA, 20 bp, synthetic construct
  source 1..20: mol_type = other DNA
ttgtatttttagtagagacc

SEQ ID NO: 288738 - DNA, 20 bp, synthetic construct
  source 1..20: mol_type = other DNA
tttgtatttttagtagagac

SEQ ID NO: 288739 - DNA, 20 bp, synthetic construct
  source 1..20: mol_type = other DNA
ttttgtatttttagtagaga

SEQ ID NO: 288740 - DNA, 20 bp, synthetic construct
  source 1..20: mol_type = other DNA
tttttgtatttttagtagag

SEQ ID NO: 288741 - DNA, 20 bp, synthetic construct
  source 1..20: mol_type = other DNA
ttttttgtatttttagtaga

SEQ ID NO: 288742 - DNA, 20 bp, synthetic construct
  source 1..20: mol_type = other DNA
attttttgtatttttagtag

SEQ ID NO: 288743 - DNA, 20 bp, synthetic construct
  source 1..20: mol_type = other DNA
aattttttgtatttttagta

SEQ ID NO: 288744 - DNA, 20 bp, synthetic construct
  source 1..20: mol_type = other DNA
taattttttgtatttttagt

SEQ ID NO: 288745 - DNA, 20 bp, synthetic construct
  source 1..20: mol_type = other DNA
ctaattttttgtatttttag

SEQ ID NO: 288746 - DNA, 20 bp, synthetic construct
  source 1..20: mol_type = other DNA
gctaattttttgtattttta

SEQ ID NO: 288747 - DNA, 20 bp, synthetic construct
  source 1..20: mol_type = other DNA
ggctaattttttgtattttt

SEQ ID NO: 288748 - DNA, 20 bp, synthetic construct
  source 1..20: mol_type = other DNA
tggctaattttttgtatttt

SEQ ID NO: 288749 - DNA, 20 bp, synthetic construct
  source 1..20: mol_type = other DNA
ctggctaattttttgtattt

SEQ ID NO: 288750 - DNA, 20 bp, synthetic construct
  source 1..20: mol_type = other DNA
cctggctaattttttgtatt

SEQ ID NO: 288751 - DNA, 20 bp, synthetic construct
  source 1..20: mol_type = other DNA
gcctggctaattttttgtat

SEQ ID NO: 288752 - DNA, 20 bp, synthetic construct
  source 1..20: mol_type = other DNA
cgcctggctaattttttgta

SEQ ID NO: 288753 - DNA, 20 bp, synthetic construct
  source 1..20: mol_type = other DNA
acgcctggctaattttttgt

SEQ ID NO: 288754 - DNA, 20 bp, synthetic construct
  source 1..20: mol_type = other DNA
cacgcctggctaattttttg

SEQ ID NO: 288755 - DNA, 20 bp, synthetic construct
  source 1..20: mol_type = other DNA
ccacgcctggctaatttttt

SEQ ID NO: 288756 - DNA, 20 bp, synthetic construct
  source 1..20: mol_type = other DNA
accacgcctggctaattttt

SEQ ID NO: 288757 - DNA, 20 bp, synthetic construct
  source 1..20: mol_type = other DNA
caccacgcctggctaatttt

SEQ ID NO: 288758 - DNA, 20 bp, synthetic construct
  source 1..20: mol_type = other DNA
ccaccacgcctggctaattt

SEQ ID NO: 288759 - DNA, 20 bp, synthetic construct
  source 1..20: mol_type = other DNA
gccaccacgcctggctaatt

SEQ ID NO: 288760 - DNA, 20 bp, synthetic construct
  source 1..20: mol_type = other DNA
tgccaccacgcctggctaat

SEQ ID NO: 288761 - DNA, 20 bp, synthetic construct
  source 1..20: mol_type = other DNA
ctgccaccacgcctggctaa

SEQ ID NO: 288762 - DNA, 20 bp, synthetic construct
  source 1..20: mol_type = other DNA
cctgccaccacgcctggcta

SEQ ID NO: 288763 - DNA, 20 bp, synthetic construct
  source 1..20: mol_type = other DNA
acctgccaccacgcctggct

SEQ ID NO: 288764 - DNA, 20 bp, synthetic construct
  source 1..20: mol_type = other DNA
cacctgccaccacgcctggc

SEQ ID NO: 288765 - DNA, 20 bp, synthetic construct
  source 1..20: mol_type = other DNA
gcacctgccaccacgcctgg

SEQ ID NO: 288766 - DNA, 20 bp, synthetic construct
  source 1..20: mol_type = other DNA
ggcacctgccaccacgcctg

SEQ ID NO: 288767 - DNA, 20 bp, synthetic construct
  source 1..20: mol_type = other DNA
aggcacctgccaccacgcct

SEQ ID NO: 288768 - DNA, 20 bp, synthetic construct
  source 1..20: mol_type = other DNA
taggcacctgccaccacgcc

SEQ ID NO: 288769 - DNA, 20 bp, synthetic construct
  source 1..20: mol_type = other DNA
ataggcacctgccaccacgc

SEQ ID NO: 288770 - DNA, 20 bp, synthetic construct
  source 1..20: mol_type = other DNA
tataggcacctgccaccacg

SEQ ID NO: 288771 - DNA, 20 bp, synthetic construct
  source 1..20: mol_type = other DNA
ctataggcacctgccaccac

SEQ ID NO: 288772 - DNA, 20 bp, synthetic construct
  source 1..20: mol_type = other DNA
actataggcacctgccacca

SEQ ID NO: 288773 - DNA, 20 bp, synthetic construct
  source 1..20: mol_type = other DNA
gactataggcacctgccacc

SEQ ID NO: 288774 - DNA, 20 bp, synthetic construct
  source 1..20: mol_type = other DNA
ggactataggcacctgccac

SEQ ID NO: 288775 - DNA, 20 bp, synthetic construct
  source 1..20: mol_type = other DNA
gggactataggcacctgcca

SEQ ID NO: 288776 - DNA, 20 bp, synthetic construct
  source 1..20: mol_type = other DNA
tgggactataggcacctgcc

SEQ ID NO: 288777 - DNA, 20 bp, synthetic construct
  source 1..20: mol_type = other DNA
ctgggactataggcacctgc

SEQ ID NO: 288778 - DNA, 20 bp, synthetic construct
  source 1..20: mol_type = other DNA
gctgggactataggcacctg

SEQ ID NO: 288779 - DNA, 20 bp, synthetic construct
  source 1..20: mol_type = other DNA
agctgggactataggcacct

SEQ ID NO: 288780 - DNA, 20 bp, synthetic construct
  source 1..20: mol_type = other DNA
tagctgggactataggcacc

SEQ ID NO: 288781 - DNA, 20 bp, synthetic construct
  source 1..20: mol_type = other DNA
gtagctgggactataggcac

SEQ ID NO: 288782 - DNA, 20 bp, synthetic construct
  source 1..20: mol_type = other DNA
agtagctgggactataggca

SEQ ID NO: 288783 - DNA, 20 bp, synthetic construct
  source 1..20: mol_type = other DNA
gagtagctgggactataggc

SEQ ID NO: 288784 - DNA, 20 bp, synthetic construct
  source 1..20: mol_type = other DNA
tgagtagctgggactatagg

SEQ ID NO: 288785 - DNA, 20 bp, synthetic construct
  source 1..20: mol_type = other DNA
gtgagtagctgggactatag

SEQ ID NO: 288786 - DNA, 20 bp, synthetic construct
  source 1..20: mol_type = other DNA
tgtgagtagctgggactata

SEQ ID NO: 288787 - DNA, 20 bp, synthetic construct
  source 1..20: mol_type = other DNA
ttgtgagtagctgggactat

SEQ ID NO: 288788 - DNA, 20 bp, synthetic construct
  source 1..20: mol_type = other DNA
cttgtgagtagctgggacta

SEQ ID NO: 288789 - DNA, 20 bp, synthetic construct
  source 1..20: mol_type = other DNA
ccttgtgagtagctgggact

SEQ ID NO: 288790 - DNA, 20 bp, synthetic construct
  source 1..20: mol_type = other DNA
gccttgtgagtagctgggac

SEQ ID NO: 288791 - DNA, 20 bp, synthetic construct
  source 1..20: mol_type = other DNA
agccttgtgagtagctggga

SEQ ID NO: 288792 - DNA, 20 bp, synthetic construct
  source 1..20: mol_type = other DNA
cagccttgtgagtagctggg

SEQ ID NO: 288793 - DNA, 20 bp, synthetic construct
  source 1..20: mol_type = other DNA
tcagccttgtgagtagctgg

SEQ ID NO: 288794 - DNA, 20 bp, synthetic construct
  source 1..20: mol_type = other DNA
ctcagccttgtgagtagctg

SEQ ID NO: 288795 - DNA, 20 bp, synthetic construct
  source 1..20: mol_type = other DNA
cctcagccttgtgagtagct

SEQ ID NO: 288796 - DNA, 20 bp, synthetic construct
  source 1..20: mol_type = other DNA
gcctcagccttgtgagtagc

SEQ ID NO: 288797 - DNA, 20 bp, synthetic construct
  source 1..20: mol_type = other DNA
tgcctcagccttgtgagtag

SEQ ID NO: 288798 - DNA, 20 bp, synthetic construct
  source 1..20: mol_type = other DNA
ctgcctcagccttgtgagta

SEQ ID NO: 288799 - DNA, 20 bp, synthetic construct
  source 1..20: mol_type = other DNA
cctgcctcagccttgtgagt

SEQ ID NO: 288800 - DNA, 20 bp, synthetic construct
  source 1..20: mol_type = other DNA
tcctgcctcagccttgtgag

SEQ ID NO: 288801 - DNA, 20 bp, synthetic construct
  source 1..20: mol_type = other DNA
ctcctgcctcagccttgtga

SEQ ID NO: 288802 - DNA, 20 bp, synthetic construct
  source 1..20: mol_type = other DNA
tctcctgcctcagccttgtg

SEQ ID NO: 288803 - DNA, 20 bp, synthetic construct
  source 1..20: mol_type = other DNA
ttctcctgcctcagccttgt

SEQ ID NO: 288804 - DNA, 20 bp, synthetic construct
  source 1..20: mol_type = other DNA
attctcctgcctcagccttg

SEQ ID NO: 288805 - DNA, 20 bp, synthetic construct
  source 1..20: mol_type = other DNA
cattctcctgcctcagcctt

SEQ ID NO: 288806 - DNA, 20 bp, synthetic construct
  source 1..20: mol_type = other DNA
ccattctcctgcctcagcct

SEQ ID NO: 288807 - DNA, 20 bp, synthetic construct
  source 1..20: mol_type = other DNA
gccattctcctgcctcagcc

SEQ ID NO: 288808 - DNA, 20 bp, synthetic construct
  source 1..20: mol_type = other DNA
tgccattctcctgcctcagc

SEQ ID NO: 288809 - DNA, 20 bp, synthetic construct
  source 1..20: mol_type = other DNA
atgccattctcctgcctcag

SEQ ID NO: 288810 - DNA, 20 bp, synthetic construct
  source 1..20: mol_type = other DNA
catgccattctcctgcctca

SEQ ID NO: 288811 - DNA, 20 bp, synthetic construct
  source 1..20: mol_type = other DNA
tcatgccattctcctgcctc

SEQ ID NO: 288812 - DNA, 20 bp, synthetic construct
  source 1..20: mol_type = other DNA
ttcatgccattctcctgcct

SEQ ID NO: 288813 - DNA, 20 bp, synthetic construct
  source 1..20: mol_type = other DNA
gttcatgccattctcctgcc

SEQ ID NO: 288814 - DNA, 20 bp, synthetic construct
  source 1..20: mol_type = other DNA
ggttcatgccattctcctgc

SEQ ID NO: 288815 - DNA, 20 bp, synthetic construct
  source 1..20: mol_type = other DNA
aggttcatgccattctcctg

SEQ ID NO: 288816 - DNA, 20 bp, synthetic construct
  source 1..20: mol_type = other DNA
caggttcatgccattctcct

SEQ ID NO: 288817 - DNA, 20 bp, synthetic construct
  source 1..20: mol_type = other DNA
ccaggttcatgccattctcc

SEQ ID NO: 288818 - DNA, 20 bp, synthetic construct
  source 1..20: mol_type = other DNA
cccaggttcatgccattctc

SEQ ID NO: 288819 - DNA, 20 bp, synthetic construct
  source 1..20: mol_type = other DNA
tcccaggttcatgccattct

SEQ ID NO: 288820 - DNA, 20 bp, synthetic construct
  source 1..20: mol_type = other DNA
ctcccaggttcatgccattc

SEQ ID NO: 288821 - DNA, 20 bp, synthetic construct
  source 1..20: mol_type = other DNA
cctcccaggttcatgccatt

SEQ ID NO: 288822 - DNA, 20 bp, synthetic construct
  source 1..20: mol_type = other DNA
gcctcccaggttcatgccat

SEQ ID NO: 288823 - DNA, 20 bp, synthetic construct
  source 1..20: mol_type = other DNA
cgcctcccaggttcatgcca

SEQ ID NO: 288824 - DNA, 20 bp, synthetic construct
  source 1..20: mol_type = other DNA
ccgcctcccaggttcatgcc

SEQ ID NO: 288825 - DNA, 20 bp, synthetic construct
  source 1..20: mol_type = other DNA
tccgcctcccaggttcatgc

SEQ ID NO: 288826 - DNA, 20 bp, synthetic construct
  source 1..20: mol_type = other DNA
ctccgcctcccaggttcatg

SEQ ID NO: 288827 - DNA, 20 bp, synthetic construct
  source 1..20: mol_type = other DNA
gctccgcctcccaggttcat

SEQ ID NO: 288828 - DNA, 20 bp, synthetic construct
  source 1..20: mol_type = other DNA
agctccgcctcccaggttca

SEQ ID NO: 288829 - DNA, 20 bp, synthetic construct
  source 1..20: mol_type = other DNA
aagctccgcctcccaggttc

SEQ ID NO: 288830 - DNA, 20 bp, synthetic construct
  source 1..20: mol_type = other DNA
caagctccgcctcccaggtt

SEQ ID NO: 288831 - DNA, 20 bp, synthetic construct
  source 1..20: mol_type = other DNA
gcaagctccgcctcccaggt

SEQ ID NO: 288832 - DNA, 20 bp, synthetic construct
  source 1..20: mol_type = other DNA
tgcaagctccgcctcccagg

SEQ ID NO: 288833 - DNA, 20 bp, synthetic construct
  source 1..20: mol_type = other DNA
ctgcaagctccgcctcccag

SEQ ID NO: 288834 - DNA, 20 bp, synthetic construct
  source 1..20: mol_type = other DNA
actgcaagctccgcctccca

SEQ ID NO: 288835 - DNA, 20 bp, synthetic construct
  source 1..20: mol_type = other DNA
cactgcaagctccgcctccc

SEQ ID NO: 288836 - DNA, 20 bp, synthetic construct
  source 1..20: mol_type = other DNA
tcactgcaagctccgcctcc

SEQ ID NO: 288837 - DNA, 20 bp, synthetic construct
  source 1..20: mol_type = other DNA
ctcactgcaagctccgcctc

SEQ ID NO: 288838 - DNA, 20 bp, synthetic construct
  source 1..20: mol_type = other DNA
gctcactgcaagctccgcct

SEQ ID NO: 288839 - DNA, 20 bp, synthetic construct
  source 1..20: mol_type = other DNA
ggctcactgcaagctccgcc

SEQ ID NO: 288840 - DNA, 20 bp, synthetic construct
  source 1..20: mol_type = other DNA
cggctcactgcaagctccgc

SEQ ID NO: 288841 - DNA, 20 bp, synthetic construct
  source 1..20: mol_type = other DNA
tcggctcactgcaagctccg

SEQ ID NO: 288842 - DNA, 20 bp, synthetic construct
  source 1..20: mol_type = other DNA
ctcggctcactgcaagctcc

SEQ ID NO: 288843 - DNA, 20 bp, synthetic construct
  source 1..20: mol_type = other DNA
tctcggctcactgcaagctc

SEQ ID NO: 288844 - DNA, 20 bp, synthetic construct
  source 1..20: mol_type = other DNA
atctcggctcactgcaagct

SEQ ID NO: 288845 - DNA, 20 bp, synthetic construct
  source 1..20: mol_type = other DNA
aatctcggctcactgcaagc

SEQ ID NO: 288846 - DNA, 20 bp, synthetic construct
  source 1..20: mol_type = other DNA
caatctcggctcactgcaag

SEQ ID NO: 288847 - DNA, 20 bp, synthetic construct
  source 1..20: mol_type = other DNA
acaatctcggctcactgcaa

SEQ ID NO: 288848 - DNA, 20 bp, synthetic construct
  source 1..20: mol_type = other DNA
cacaatctcggctcactgca

SEQ ID NO: 288849 - DNA, 20 bp, synthetic construct
  source 1..20: mol_type = other DNA
gcacaatctcggctcactgc

SEQ ID NO: 288850 - DNA, 20 bp, synthetic construct
  source 1..20: mol_type = other DNA
ggcacaatctcggctcactg

SEQ ID NO: 288851 - DNA, 20 bp, synthetic construct
  source 1..20: mol_type = other DNA
tggcacaatctcggctcact

SEQ ID NO: 288852 - DNA, 20 bp, synthetic construct
  source 1..20: mol_type = other DNA
gtggcacaatctcggctcac

SEQ ID NO: 288853 - DNA, 20 bp, synthetic construct
  source 1..20: mol_type = other DNA
agtggcacaatctcggctca

SEQ ID NO: 288854 - DNA, 20 bp, synthetic construct
  source 1..20: mol_type = other DNA
cagtggcacaatctcggctc

SEQ ID NO: 288855 - DNA, 20 bp, synthetic construct
  source 1..20: mol_type = other DNA
gcagtggcacaatctcggct

SEQ ID NO: 288856 - DNA, 20 bp, synthetic construct
  source 1..20: mol_type = other DNA
tgcagtggcacaatctcggc

SEQ ID NO: 288857 - DNA, 20 bp, synthetic construct
  source 1..20: mol_type = other DNA
gtgcagtggcacaatctcgg

SEQ ID NO: 288858 - DNA, 20 bp, synthetic construct
  source 1..20: mol_type = other DNA
agtgcagtggcacaatctcg

SEQ ID NO: 288859 - DNA, 20 bp, synthetic construct
  source 1..20: mol_type = other DNA
gagtgcagtggcacaatctc

SEQ ID NO: 288860 - DNA, 20 bp, synthetic construct
  source 1..20: mol_type = other DNA
ggagtgcagtggcacaatct

SEQ ID NO: 288861 - DNA, 20 bp, synthetic construct
  source 1..20: mol_type = other DNA
tggagtgcagtggcacaatc

SEQ ID NO: 288862 - DNA, 20 bp, synthetic construct
  source 1..20: mol_type = other DNA
ctggagtgcagtggcacaat

SEQ ID NO: 288863 - DNA, 20 bp, synthetic construct
  source 1..20: mol_type = other DNA
gctggagtgcagtggcacaa

SEQ ID NO: 288864 - DNA, 20 bp, synthetic construct
  source 1..20: mol_type = other DNA
ggctggagtgcagtggcaca

SEQ ID NO: 288865 - DNA, 20 bp, synthetic construct
  source 1..20: mol_type = other DNA
aggctggagtgcagtggcac

SEQ ID NO: 288866 - DNA, 20 bp, synthetic construct
  source 1..20: mol_type = other DNA
caggctggagtgcagtggca

SEQ ID NO: 288867 - DNA, 20 bp, synthetic construct
  source 1..20: mol_type = other DNA
ccaggctggagtgcagtggc

SEQ ID NO: 288868 - DNA, 20 bp, synthetic construct
  source 1..20: mol_type = other DNA
cccaggctggagtgcagtgg

SEQ ID NO: 288869 - DNA, 20 bp, synthetic construct
  source 1..20: mol_type = other DNA
gcccaggctggagtgcagtg

SEQ ID NO: 288870 - DNA, 20 bp, synthetic construct
  source 1..20: mol_type = other DNA
cgcccaggctggagtgcagt

SEQ ID NO: 288871 - DNA, 20 bp, synthetic construct
  source 1..20: mol_type = other DNA
tcgcccaggctggagtgcag

SEQ ID NO: 288872 - DNA, 20 bp, synthetic construct
  source 1..20: mol_type = other DNA
ctcgcccaggctggagtgca

SEQ ID NO: 288873 - DNA, 20 bp, synthetic construct
  source 1..20: mol_type = other DNA
tctcgcccaggctggagtgc

SEQ ID NO: 288874 - DNA, 20 bp, synthetic construct
  source 1..20: mol_type = other DNA
ctctcgcccaggctggagtg

SEQ ID NO: 288875 - DNA, 20 bp, synthetic construct
  source 1..20: mol_type = other DNA
tctctcgcccaggctggagt

SEQ ID NO: 288876 - DNA, 20 bp, synthetic construct
  source 1..20: mol_type = other DNA
ctctctcgcccaggctggag

SEQ ID NO: 288877 - DNA, 20 bp, synthetic construct
  source 1..20: mol_type = other DNA
actctctcgcccaggctgga

SEQ ID NO: 288878 - DNA, 20 bp, synthetic construct
  source 1..20: mol_type = other DNA
cactctctcgcccaggctgg

SEQ ID NO: 288879 - DNA, 20 bp, synthetic construct
  source 1..20: mol_type = other DNA
tcactctctcgcccaggctg

SEQ ID NO: 288880 - DNA, 20 bp, synthetic construct
  source 1..20: mol_type = other DNA
ctcactctctcgcccaggct

SEQ ID NO: 288881 - DNA, 20 bp, synthetic construct
  source 1..20: mol_type = other DNA
tctcactctctcgcccaggc

SEQ ID NO: 288882 - DNA, 20 bp, synthetic construct
  source 1..20: mol_type = other DNA
gtctcactctctcgcccagg

SEQ ID NO: 288883 - DNA, 20 bp, synthetic construct
  source 1..20: mol_type = other DNA
agtctcactctctcgcccag

SEQ ID NO: 288884 - DNA, 20 bp, synthetic construct
  source 1..20: mol_type = other DNA
gagtctcactctctcgccca

SEQ ID NO: 288885 - DNA, 20 bp, synthetic construct
  source 1..20: mol_type = other DNA
ggagtctcactctctcgccc

SEQ ID NO: 288886 - DNA, 20 bp, synthetic construct
  source 1..20: mol_type = other DNA
cggagtctcactctctcgcc

SEQ ID NO: 288887 - DNA, 20 bp, synthetic construct
  source 1..20: mol_type = other DNA
acggagtctcactctctcgc

SEQ ID NO: 288888 - DNA, 20 bp, synthetic construct
  source 1..20: mol_type = other DNA
gacggagtctcactctctcg

SEQ ID NO: 288889 - DNA, 20 bp, synthetic construct
  source 1..20: mol_type = other DNA
agacggagtctcactctctc

SEQ ID NO: 288890 - DNA, 20 bp, synthetic construct
  source 1..20: mol_type = other DNA
gagacggagtctcactctct

SEQ ID NO: 288891 - DNA, 20 bp, synthetic construct
  source 1..20: mol_type = other DNA
tgagacggagtctcactctc

SEQ ID NO: 288892 - DNA, 20 bp, synthetic construct
  source 1..20: mol_type = other DNA
ttgagacggagtctcactct

SEQ ID NO: 288893 - DNA, 20 bp, synthetic construct
  source 1..20: mol_type = other DNA
tttgagacggagtctcactc

SEQ ID NO: 288894 - DNA, 20 bp, synthetic construct
  source 1..20: mol_type = other DNA
ttttgagacggagtctcact

SEQ ID NO: 288895 - DNA, 20 bp, synthetic construct
  source 1..20: mol_type = other DNA
gttttgagacggagtctcac

SEQ ID NO: 288896 - DNA, 20 bp, synthetic construct
  source 1..20: mol_type = other DNA
tgttttgagacggagtctca

SEQ ID NO: 288897 - DNA, 20 bp, synthetic construct
  source 1..20: mol_type = other DNA
ttgttttgagacggagtctc

SEQ ID NO: 288898 - DNA, 20 bp, synthetic construct
  source 1..20: mol_type = other DNA
tttgttttgagacggagtct

SEQ ID NO: 288899 - DNA, 20 bp, synthetic construct
  source 1..20: mol_type = other DNA
ttttgttttgagacggagtc

SEQ ID NO: 288900 - DNA, 20 bp, synthetic construct
  source 1..20: mol_type = other DNA
tttttgttttgagacggagt

SEQ ID NO: 288901 - DNA, 20 bp, synthetic construct
  source 1..20: mol_type = other DNA
gtttttgttttgagacggag

SEQ ID NO: 288902 - DNA, 20 bp, synthetic construct
  source 1..20: mol_type = other DNA
tgtttttgttttgagacgga

SEQ ID NO: 288903 - DNA, 20 bp, synthetic construct
  source 1..20: mol_type = other DNA
ttgtttttgttttgagacgg

SEQ ID NO: 288904 - DNA, 20 bp, synthetic construct
  source 1..20: mol_type = other DNA
tttgtttttgttttgagacg

SEQ ID NO: 288905 - DNA, 20 bp, synthetic construct
  source 1..20: mol_type = other DNA
ttttgtttttgttttgagac

SEQ ID NO: 288906 - DNA, 20 bp, synthetic construct
  source 1..20: mol_type = other DNA
tttttgtttttgttttgaga

SEQ ID NO: 288907 - DNA, 20 bp, synthetic construct
  source 1..20: mol_type = other DNA
gtttttgtttttgttttgag

SEQ ID NO: 288908 - DNA, 20 bp, synthetic construct
  source 1..20: mol_type = other DNA
tgtttttgtttttgttttga

SEQ ID NO: 288909 - DNA, 20 bp, synthetic construct
  source 1..20: mol_type = other DNA
ttgtttttgtttttgttttg

SEQ ID NO: 288910 - DNA, 20 bp, synthetic construct
  source 1..20: mol_type = other DNA
tttgtttttgtttttgtttt

SEQ ID NO: 288911 - DNA, 20 bp, synthetic construct
  source 1..20: mol_type = other DNA
ttttgtttttgtttttgttt

SEQ ID NO: 288912 - DNA, 20 bp, synthetic construct
  source 1..20: mol_type = other DNA
tttttgtttttgtttttgtt

SEQ ID NO: 288913 - DNA, 20 bp, synthetic construct
  source 1..20: mol_type = other DNA
gtttttgtttttgtttttgt

SEQ ID NO: 288914 - DNA, 20 bp, synthetic construct
  source 1..20: mol_type = other DNA
tgtttttgtttttgtttttg

SEQ ID NO: 288915 - DNA, 20 bp, synthetic construct
  source 1..20: mol_type = other DNA
ttgtttttgtttttgttttt

SEQ ID NO: 288916 - DNA, 20 bp, synthetic construct
  source 1..20: mol_type = other DNA
tttgtttttgtttttgtttt

SEQ ID NO: 288917 - DNA, 20 bp, synthetic construct
  source 1..20: mol_type = other DNA
ttttgtttttgtttttgttt

SEQ ID NO: 288918 - DNA, 20 bp, synthetic construct
  source 1..20: mol_type = other DNA
tttttgtttttgtttttgtt

SEQ ID NO: 288919 - DNA, 20 bp, synthetic construct
  source 1..20: mol_type = other DNA
gtttttgtttttgtttttgt

SEQ ID NO: 288920 - DNA, 20 bp, synthetic construct
  source 1..20: mol_type = other DNA
tgtttttgtttttgtttttg

SEQ ID NO: 288921 - DNA, 20 bp, synthetic construct
  source 1..20: mol_type = other DNA
ttgtttttgtttttgttttt

SEQ ID NO: 288922 - DNA, 20 bp, synthetic construct
  source 1..20: mol_type = other DNA
tttgtttttgtttttgtttt

SEQ ID NO: 288923 - DNA, 20 bp, synthetic construct
  source 1..20: mol_type = other DNA
gtttgtttttgtttttgttt

SEQ ID NO: 288924 - DNA, 20 bp, synthetic construct
  source 1..20: mol_type = other DNA
tgtttgtttttgtttttgtt

SEQ ID NO: 288925 - DNA, 20 bp, synthetic construct
  source 1..20: mol_type = other DNA
gtgtttgtttttgtttttgt

SEQ ID NO: 288926 - DNA, 20 bp, synthetic construct
  source 1..20: mol_type = other DNA
tgtgtttgtttttgtttttg

SEQ ID NO: 288927 - DNA, 20 bp, synthetic construct
  source 1..20: mol_type = other DNA
gtgtgtttgtttttgttttt

SEQ ID NO: 288928 - DNA, 20 bp, synthetic construct
  source 1..20: mol_type = other DNA
tgtgtgtttgtttttgtttt

SEQ ID NO: 288929 - DNA, 20 bp, synthetic construct
  source 1..20: mol_type = other DNA
ttgtgtgtttgtttttgttt

SEQ ID NO: 288930 - DNA, 20 bp, synthetic construct
  source 1..20: mol_type = other DNA
gttgtgtgtttgtttttgtt

SEQ ID NO: 288931 - DNA, 20 bp, synthetic construct
  source 1..20: mol_type = other DNA
tgttgtgtgtttgtttttgt

SEQ ID NO: 288932 - DNA, 20 bp, synthetic construct
  source 1..20: mol_type = other DNA
ttgttgtgtgtttgtttttg

SEQ ID NO: 288933 - DNA, 20 bp, synthetic construct
  source 1..20: mol_type = other DNA
tttgttgtgtgtttgttttt

SEQ ID NO: 288934 - DNA, 20 bp, synthetic construct
  source 1..20: mol_type = other DNA
ttttgttgtgtgtttgtttt

SEQ ID NO: 288935 - DNA, 20 bp, synthetic construct
  source 1..20: mol_type = other DNA
tttttgttgtgtgtttgttt

SEQ ID NO: 288936 - DNA, 20 bp, synthetic construct
  source 1..20: mol_type = other DNA
gtttttgttgtgtgtttgtt

SEQ ID NO: 288937 - DNA, 20 bp, synthetic construct
  source 1..20: mol_type = other DNA
ggtttttgttgtgtgtttgt

SEQ ID NO: 288938 - DNA, 20 bp, synthetic construct
  source 1..20: mol_type = other DNA
aggtttttgttgtgtgtttg

SEQ ID NO: 288939 - DNA, 20 bp, synthetic construct
  source 1..20: mol_type = other DNA
taggtttttgttgtgtgttt

SEQ ID NO: 288940 - DNA, 20 bp, synthetic construct
  source 1..20: mol_type = other DNA
ttaggtttttgttgtgtgtt

SEQ ID NO: 288941 - DNA, 20 bp, synthetic construct
  source 1..20: mol_type = other DNA
tttaggtttttgttgtgtgt

SEQ ID NO: 288942 - DNA, 20 bp, synthetic construct
  source 1..20: mol_type = other DNA
ttttaggtttttgttgtgtg

SEQ ID NO: 288943 - DNA, 20 bp, synthetic construct
  source 1..20: mol_type = other DNA
cttttaggtttttgttgtgt

SEQ ID NO: 288944 - DNA, 20 bp, synthetic construct
  source 1..20: mol_type = other DNA
tcttttaggtttttgttgtg

SEQ ID NO: 288945 - DNA, 20 bp, synthetic construct
  source 1..20: mol_type = other DNA
ttcttttaggtttttgttgt

SEQ ID NO: 288946 - DNA, 20 bp, synthetic construct
  source 1..20: mol_type = other DNA
attcttttaggtttttgttg

SEQ ID NO: 288947 - DNA, 20 bp, synthetic construct
  source 1..20: mol_type = other DNA
tattcttttaggtttttgtt

SEQ ID NO: 288948 - DNA, 20 bp, synthetic construct
  source 1..20: mol_type = other DNA
atattcttttaggtttttgt

SEQ ID NO: 288949 - DNA, 20 bp, synthetic construct
  source 1..20: mol_type = other DNA
tatattcttttaggtttttg

SEQ ID NO: 288950 - DNA, 20 bp, synthetic construct
  source 1..20: mol_type = other DNA
ttatattcttttaggttttt

SEQ ID NO: 288951 - DNA, 20 bp, synthetic construct
  source 1..20: mol_type = other DNA
tttatattcttttaggtttt

SEQ ID NO: 288952 - DNA, 20 bp, synthetic construct
  source 1..20: mol_type = other DNA
atttatattcttttaggttt

SEQ ID NO: 288953 - DNA, 20 bp, synthetic construct
  source 1..20: mol_type = other DNA
catttatattcttttaggtt

SEQ ID NO: 288954 - DNA, 20 bp, synthetic construct
  source 1..20: mol_type = other DNA
ccatttatattcttttaggt

SEQ ID NO: 288955 - DNA, 20 bp, synthetic construct
  source 1..20: mol_type = other DNA
tccatttatattcttttagg

SEQ ID NO: 288956 - DNA, 20 bp, synthetic construct
  source 1..20: mol_type = other DNA
atccatttatattcttttag

SEQ ID NO: 288957 - DNA, 20 bp, synthetic construct
  source 1..20: mol_type = other DNA
aatccatttatattctttta

SEQ ID NO: 288958 - DNA, 20 bp, synthetic construct
  source 1..20: mol_type = other DNA
caatccatttatattctttt

SEQ ID NO: 288959 - DNA, 20 bp, synthetic construct
  source 1..20: mol_type = other DNA
acaatccatttatattcttt

SEQ ID NO: 288960 - DNA, 20 bp, synthetic construct
  source 1..20: mol_type = other DNA
aacaatccatttatattctt

SEQ ID NO: 288961 - DNA, 20 bp, synthetic construct
  source 1..20: mol_type = other DNA
aaacaatccatttatattct

SEQ ID NO: 288962 - DNA, 20 bp, synthetic construct
  source 1..20: mol_type = other DNA
caaacaatccatttatattc

SEQ ID NO: 288963 - DNA, 20 bp, synthetic construct
  source 1..20: mol_type = other DNA
acaaacaatccatttatatt

SEQ ID NO: 288964 - DNA, 20 bp, synthetic construct
  source 1..20: mol_type = other DNA
tacaaacaatccatttatat

SEQ ID NO: 288965 - DNA, 20 bp, synthetic construct
  source 1..20: mol_type = other DNA
ttacaaacaatccatttata

SEQ ID NO: 288966 - DNA, 20 bp, synthetic construct
  source 1..20: mol_type = other DNA
gttacaaacaatccatttat

SEQ ID NO: 288967 - DNA, 20 bp, synthetic construct
  source 1..20: mol_type = other DNA
tgttacaaacaatccattta

SEQ ID NO: 288968 - DNA, 20 bp, synthetic construct
  source 1..20: mol_type = other DNA
gtgttacaaacaatccattt

SEQ ID NO: 288969 - DNA, 20 bp, synthetic construct
  source 1..20: mol_type = other DNA
tgtgttacaaacaatccatt

SEQ ID NO: 288970 - DNA, 20 bp, synthetic construct
  source 1..20: mol_type = other DNA
ttgtgttacaaacaatccat

SEQ ID NO: 288971 - DNA, 20 bp, synthetic construct
  source 1..20: mol_type = other DNA
tttgtgttacaaacaatcca

SEQ ID NO: 288972 - DNA, 20 bp, synthetic construct
  source 1..20: mol_type = other DNA
ctttgtgttacaaacaatcc

SEQ ID NO: 288973 - DNA, 20 bp, synthetic construct
  source 1..20: mol_type = other DNA
cctttgtgttacaaacaatc

SEQ ID NO: 288974 - DNA, 20 bp, synthetic construct
  source 1..20: mol_type = other DNA
tcctttgtgttacaaacaat

SEQ ID NO: 288975 - DNA, 20 bp, synthetic construct
  source 1..20: mol_type = other DNA
gtcctttgtgttacaaacaa

SEQ ID NO: 288976 - DNA, 20 bp, synthetic construct
  source 1..20: mol_type = other DNA
tgtcctttgtgttacaaaca

SEQ ID NO: 288977 - DNA, 20 bp, synthetic construct
  source 1..20: mol_type = other DNA
ttgtcctttgtgttacaaac

SEQ ID NO: 288978 - DNA, 20 bp, synthetic construct
  source 1..20: mol_type = other DNA
tttgtcctttgtgttacaaa

SEQ ID NO: 288979 - DNA, 20 bp, synthetic construct
  source 1..20: mol_type = other DNA
atttgtcctttgtgttacaa

SEQ ID NO: 288980 - DNA, 20 bp, synthetic construct
  source 1..20: mol_type = other DNA
catttgtcctttgtgttaca

SEQ ID NO: 288981 - DNA, 20 bp, synthetic construct
  source 1..20: mol_type = other DNA
acatttgtcctttgtgttac

SEQ ID NO: 288982 - DNA, 20 bp, synthetic construct
  source 1..20: mol_type = other DNA
aacatttgtcctttgtgtta

SEQ ID NO: 288983 - DNA, 20 bp, synthetic construct
  source 1..20: mol_type = other DNA
aaacatttgtcctttgtgtt

SEQ ID NO: 288984 - DNA, 20 bp, synthetic construct
  source 1..20: mol_type = other DNA
caaacatttgtcctttgtgt

SEQ ID NO: 288985 - DNA, 20 bp, synthetic construct
  source 1..20: mol_type = other DNA
tcaaacatttgtcctttgtg

SEQ ID NO: 288986 - DNA, 20 bp, synthetic construct
  source 1..20: mol_type = other DNA
ctcaaacatttgtcctttgt

SEQ ID NO: 288987 - DNA, 20 bp, synthetic construct
  source 1..20: mol_type = other DNA
cctcaaacatttgtcctttg

SEQ ID NO: 288988 - DNA, 20 bp, synthetic construct
  source 1..20: mol_type = other DNA
ccctcaaacatttgtccttt

SEQ ID NO: 288989 - DNA, 20 bp, synthetic construct
  source 1..20: mol_type = other DNA
cccctcaaacatttgtcctt

SEQ ID NO: 288990 - DNA, 20 bp, synthetic construct
  source 1..20: mol_type = other DNA
tcccctcaaacatttgtcct

SEQ ID NO: 288991 - DNA, 20 bp, synthetic construct
  source 1..20: mol_type = other DNA
atcccctcaaacatttgtcc

SEQ ID NO: 288992 - DNA, 20 bp, synthetic construct
  source 1..20: mol_type = other DNA
catcccctcaaacatttgtc

SEQ ID NO: 288993 - DNA, 20 bp, synthetic construct
  source 1..20: mol_type = other DNA
ccatcccctcaaacatttgt

SEQ ID NO: 288994 - DNA, 20 bp, synthetic construct
  source 1..20: mol_type = other DNA
tccatcccctcaaacatttg

SEQ ID NO: 288995 - DNA, 20 bp, synthetic construct
  source 1..20: mol_type = other DNA
atccatcccctcaaacattt

SEQ ID NO: 288996 - DNA, 20 bp, synthetic construct
  source 1..20: mol_type = other DNA
tatccatcccctcaaacatt

SEQ ID NO: 288997 - DNA, 20 bp, synthetic construct
  source 1..20: mol_type = other DNA
gtatccatcccctcaaacat

SEQ ID NO: 288998 - DNA, 20 bp, synthetic construct
  source 1..20: mol_type = other DNA
ggtatccatcccctcaaaca

SEQ ID NO: 288999 - DNA, 20 bp, synthetic construct
  source 1..20: mol_type = other DNA
gggtatccatcccctcaaac

SEQ ID NO: 289000 - DNA, 20 bp, synthetic construct
  source 1..20: mol_type = other DNA
ggggtatccatcccctcaaa

SEQ ID NO: 289001 - DNA, 20 bp, synthetic construct
  source 1..20: mol_type = other DNA
tggggtatccatcccctcaa

SEQ ID NO: 289002 - DNA, 20 bp, synthetic construct
  source 1..20: mol_type = other DNA
atggggtatccatcccctca

SEQ ID NO: 289003 - DNA, 20 bp, synthetic construct
  source 1..20: mol_type = other DNA
aatggggtatccatcccctc

SEQ ID NO: 289004 - DNA, 20 bp, synthetic construct
  source 1..20: mol_type = other DNA
aaatggggtatccatcccct

SEQ ID NO: 289005 - DNA, 20 bp, synthetic construct
  source 1..20: mol_type = other DNA
aaaatggggtatccatcccc

SEQ ID NO: 289006 - DNA, 20 bp, synthetic construct
  source 1..20: mol_type = other DNA
gaaaatggggtatccatccc

SEQ ID NO: 289007 - DNA, 20 bp, synthetic construct
  source 1..20: mol_type = other DNA
ggaaaatggggtatccatcc

SEQ ID NO: 289008 - DNA, 20 bp, synthetic construct
  source 1..20: mol_type = other DNA
tggaaaatggggtatccatc

SEQ ID NO: 289009 - DNA, 20 bp, synthetic construct
  source 1..20: mol_type = other DNA
atggaaaatggggtatccat

SEQ ID NO: 289010 - DNA, 20 bp, synthetic construct
  source 1..20: mol_type = other DNA
catggaaaatggggtatcca

SEQ ID NO: 289011 - DNA, 20 bp, synthetic construct
  source 1..20: mol_type = other DNA
tcatggaaaatggggtatcc

SEQ ID NO: 289012 - DNA, 20 bp, synthetic construct
  source 1..20: mol_type = other DNA
atcatggaaaatggggtatc

SEQ ID NO: 289013 - DNA, 20 bp, synthetic construct
  source 1..20: mol_type = other DNA
catcatggaaaatggggtat

SEQ ID NO: 289014 - DNA, 20 bp, synthetic construct
  source 1..20: mol_type = other DNA
acatcatggaaaatggggta

SEQ ID NO: 289015 - DNA, 20 bp, synthetic construct
  source 1..20: mol_type = other DNA
cacatcatggaaaatggggt

SEQ ID NO: 289016 - DNA, 20 bp, synthetic construct
  source 1..20: mol_type = other DNA
tcacatcatggaaaatgggg

SEQ ID NO: 289017 - DNA, 20 bp, synthetic construct
  source 1..20: mol_type = other DNA
atcacatcatggaaaatggg

SEQ ID NO: 289018 - DNA, 20 bp, synthetic construct
  source 1..20: mol_type = other DNA
aatcacatcatggaaaatgg

SEQ ID NO: 289019 - DNA, 20 bp, synthetic construct
  source 1..20: mol_type = other DNA
taatcacatcatggaaaatg

SEQ ID NO: 289020 - DNA, 20 bp, synthetic construct
  source 1..20: mol_type = other DNA
ataatcacatcatggaaaat

SEQ ID NO: 289021 - DNA, 20 bp, synthetic construct
  source 1..20: mol_type = other DNA
aataatcacatcatggaaaa

SEQ ID NO: 289022 - DNA, 20 bp, synthetic construct
  source 1..20: mol_type = other DNA
taataatcacatcatggaaa

SEQ ID NO: 289023 - DNA, 20 bp, synthetic construct
  source 1..20: mol_type = other DNA
ataataatcacatcatggaa

SEQ ID NO: 289024 - DNA, 20 bp, synthetic construct
  source 1..20: mol_type = other DNA
tataataatcacatcatgga

SEQ ID NO: 289025 - DNA, 20 bp, synthetic construct
  source 1..20: mol_type = other DNA
gtataataatcacatcatgg

SEQ ID NO: 289026 - DNA, 20 bp, synthetic construct
  source 1..20: mol_type = other DNA
tgtataataatcacatcatg

SEQ ID NO: 289027 - DNA, 20 bp, synthetic construct
  source 1..20: mol_type = other DNA
atgtataataatcacatcat

SEQ ID NO: 289028 - DNA, 20 bp, synthetic construct
  source 1..20: mol_type = other DNA
aatgtataataatcacatca

SEQ ID NO: 289029 - DNA, 20 bp, synthetic construct
  source 1..20: mol_type = other DNA
caatgtataataatcacatc

SEQ ID NO: 289030 - DNA, 20 bp, synthetic construct
  source 1..20: mol_type = other DNA
acaatgtataataatcacat

SEQ ID NO: 289031 - DNA, 20 bp, synthetic construct
  source 1..20: mol_type = other DNA
cacaatgtataataatcaca

SEQ ID NO: 289032 - DNA, 20 bp, synthetic construct
  source 1..20: mol_type = other DNA
acacaatgtataataatcac

SEQ ID NO: 289033 - DNA, 20 bp, synthetic construct
  source 1..20: mol_type = other DNA
cacacaatgtataataatca

SEQ ID NO: 289034 - DNA, 20 bp, synthetic construct
  source 1..20: mol_type = other DNA
acacacaatgtataataatc

SEQ ID NO: 289035 - DNA, 20 bp, synthetic construct
  source 1..20: mol_type = other DNA
gacacacaatgtataataat

SEQ ID NO: 289036 - DNA, 20 bp, synthetic construct
  source 1..20: mol_type = other DNA
agacacacaatgtataataa

SEQ ID NO: 289037 - DNA, 20 bp, synthetic construct
  source 1..20: mol_type = other DNA
cagacacacaatgtataata

SEQ ID NO: 289038 - DNA, 20 bp, synthetic construct
  source 1..20: mol_type = other DNA
acagacacacaatgtataat

SEQ ID NO: 289039 - DNA, 20 bp, synthetic construct
  source 1..20: mol_type = other DNA
tacagacacacaatgtataa

SEQ ID NO: 289040 - DNA, 20 bp, synthetic construct
  source 1..20: mol_type = other DNA
atacagacacacaatgtata

SEQ ID NO: 289041 - DNA, 20 bp, synthetic construct
  source 1..20: mol_type = other DNA
gatacagacacacaatgtat

SEQ ID NO: 289042 - DNA, 20 bp, synthetic construct
  source 1..20: mol_type = other DNA
tgatacagacacacaatgta

SEQ ID NO: 289043 - DNA, 20 bp, synthetic construct
  source 1..20: mol_type = other DNA
ttgatacagacacacaatgt

SEQ ID NO: 289044 - DNA, 20 bp, synthetic construct
  source 1..20: mol_type = other DNA
tttgatacagacacacaatg

SEQ ID NO: 289045 - DNA, 20 bp, synthetic construct
  source 1..20: mol_type = other DNA
ttttgatacagacacacaat

SEQ ID NO: 289046 - DNA, 20 bp, synthetic construct
  source 1..20: mol_type = other DNA
gttttgatacagacacacaa

SEQ ID NO: 289047 - DNA, 20 bp, synthetic construct
  source 1..20: mol_type = other DNA
tgttttgatacagacacaca

SEQ ID NO: 289048 - DNA, 20 bp, synthetic construct
  source 1..20: mol_type = other DNA
atgttttgatacagacacac

SEQ ID NO: 289049 - DNA, 20 bp, synthetic construct
  source 1..20: mol_type = other DNA
gatgttttgatacagacaca

SEQ ID NO: 289050 - DNA, 20 bp, synthetic construct
  source 1..20: mol_type = other DNA
agatgttttgatacagacac

SEQ ID NO: 289051 - DNA, 20 bp, synthetic construct
  source 1..20: mol_type = other DNA
gagatgttttgatacagaca

SEQ ID NO: 289052 - DNA, 20 bp, synthetic construct
  source 1..20: mol_type = other DNA
tgagatgttttgatacagac

SEQ ID NO: 289053 - DNA, 20 bp, synthetic construct
  source 1..20: mol_type = other DNA
atgagatgttttgatacaga

SEQ ID NO: 289054 - DNA, 20 bp, synthetic construct
  source 1..20: mol_type = other DNA
catgagatgttttgatacag

SEQ ID NO: 289055 - DNA, 20 bp, synthetic construct
  source 1..20: mol_type = other DNA
tcatgagatgttttgataca

SEQ ID NO: 289056 - DNA, 20 bp, synthetic construct
  source 1..20: mol_type = other DNA
ctcatgagatgttttgatac

SEQ ID NO: 289057 - DNA, 20 bp, synthetic construct
  source 1..20: mol_type = other DNA
gctcatgagatgttttgata

SEQ ID NO: 289058 - DNA, 20 bp, synthetic construct
  source 1..20: mol_type = other DNA
ggctcatgagatgttttgat

SEQ ID NO: 289059 - DNA, 20 bp, synthetic construct
  source 1..20: mol_type = other DNA
gggctcatgagatgttttga

SEQ ID NO: 289060 - DNA, 20 bp, synthetic construct
  source 1..20: mol_type = other DNA
ggggctcatgagatgttttg

SEQ ID NO: 289061 - DNA, 20 bp, synthetic construct
  source 1..20: mol_type = other DNA
tggggctcatgagatgtttt

SEQ ID NO: 289062 - DNA, 20 bp, synthetic construct
  source 1..20: mol_type = other DNA
atggggctcatgagatgttt

SEQ ID NO: 289063 - DNA, 20 bp, synthetic construct
  source 1..20: mol_type = other DNA
tatggggctcatgagatgtt

SEQ ID NO: 289064 - DNA, 20 bp, synthetic construct
  source 1..20: mol_type = other DNA
ttatggggctcatgagatgt

SEQ ID NO: 289065 - DNA, 20 bp, synthetic construct
  source 1..20: mol_type = other DNA
tttatggggctcatgagatg

SEQ ID NO: 289066 - DNA, 20 bp, synthetic construct
  source 1..20: mol_type = other DNA
atttatggggctcatgagat

SEQ ID NO: 289067 - DNA, 20 bp, synthetic construct
  source 1..20: mol_type = other DNA
tatttatggggctcatgaga

SEQ ID NO: 289068 - DNA, 20 bp, synthetic construct
  source 1..20: mol_type = other DNA
atatttatggggctcatgag

SEQ ID NO: 289069 - DNA, 20 bp, synthetic construct
  source 1..20: mol_type = other DNA
tatatttatggggctcatga

SEQ ID NO: 289070 - DNA, 20 bp, synthetic construct
  source 1..20: mol_type = other DNA
atatatttatggggctcatg

SEQ ID NO: 289071 - DNA, 20 bp, synthetic construct
  source 1..20: mol_type = other DNA
tatatatttatggggctcat

SEQ ID NO: 289072 - DNA, 20 bp, synthetic construct
  source 1..20: mol_type = other DNA
gtatatatttatggggctca

SEQ ID NO: 289073 - DNA, 20 bp, synthetic construct
  source 1..20: mol_type = other DNA
tgtatatatttatggggctc

SEQ ID NO: 289074 - DNA, 20 bp, synthetic construct
  source 1..20: mol_type = other DNA
gtgtatatatttatggggct

SEQ ID NO: 289075 - DNA, 20 bp, synthetic construct
  source 1..20: mol_type = other DNA
ggtgtatatatttatggggc

SEQ ID NO: 289076 - DNA, 20 bp, synthetic construct
  source 1..20: mol_type = other DNA
aggtgtatatatttatgggg

SEQ ID NO: 289077 - DNA, 20 bp, synthetic construct
  source 1..20: mol_type = other DNA
taggtgtatatatttatggg

SEQ ID NO: 289078 - DNA, 20 bp, synthetic construct
  source 1..20: mol_type = other DNA
ttaggtgtatatatttatgg

SEQ ID NO: 289079 - DNA, 20 bp, synthetic construct
  source 1..20: mol_type = other DNA
gttaggtgtatatatttatg

SEQ ID NO: 289080 - DNA, 20 bp, synthetic construct
  source 1..20: mol_type = other DNA
agttaggtgtatatatttat

SEQ ID NO: 289081 - DNA, 20 bp, synthetic construct
  source 1..20: mol_type = other DNA
tagttaggtgtatatattta

SEQ ID NO: 289082 - DNA, 20 bp, synthetic construct
  source 1..20: mol_type = other DNA
atagttaggtgtatatattt

SEQ ID NO: 289083 - DNA, 20 bp, synthetic construct
  source 1..20: mol_type = other DNA
catagttaggtgtatatatt

SEQ ID NO: 289084 - DNA, 20 bp, synthetic construct
  source 1..20: mol_type = other DNA
acatagttaggtgtatatat

SEQ ID NO: 289085 - DNA, 20 bp, synthetic construct
  source 1..20: mol_type = other DNA
tacatagttaggtgtatata

SEQ ID NO: 289086 - DNA, 20 bp, synthetic construct
  source 1..20: mol_type = other DNA
gtacatagttaggtgtatat

SEQ ID NO: 289087 - DNA, 20 bp, synthetic construct
  source 1..20: mol_type = other DNA
ggtacatagttaggtgtata

SEQ ID NO: 289088 - DNA, 20 bp, synthetic construct
  source 1..20: mol_type = other DNA
gggtacatagttaggtgtat

SEQ ID NO: 289089 - DNA, 20 bp, synthetic construct
  source 1..20: mol_type = other DNA
tgggtacatagttaggtgta

SEQ ID NO: 289090 - DNA, 20 bp, synthetic construct
  source 1..20: mol_type = other DNA
gtgggtacatagttaggtgt

SEQ ID NO: 289091 - DNA, 20 bp, synthetic construct
  source 1..20: mol_type = other DNA
tgtgggtacatagttaggtg

SEQ ID NO: 289092 - DNA, 20 bp, synthetic construct
  source 1..20: mol_type = other DNA
ttgtgggtacatagttaggt

SEQ ID NO: 289093 - DNA, 20 bp, synthetic construct
  source 1..20: mol_type = other DNA
tttgtgggtacatagttagg

SEQ ID NO: 289094 - DNA, 20 bp, synthetic construct
  source 1..20: mol_type = other DNA
ttttgtgggtacatagttag

SEQ ID NO: 289095 - DNA, 20 bp, synthetic construct
  source 1..20: mol_type = other DNA
tttttgtgggtacatagtta

SEQ ID NO: 289096 - DNA, 20 bp, synthetic construct
  source 1..20: mol_type = other DNA
atttttgtgggtacatagtt

SEQ ID NO: 289097 - DNA, 20 bp, synthetic construct
  source 1..20: mol_type = other DNA
aatttttgtgggtacatagt

SEQ ID NO: 289098 - DNA, 20 bp, synthetic construct
  source 1..20: mol_type = other DNA
taatttttgtgggtacatag

SEQ ID NO: 289099 - DNA, 20 bp, synthetic construct
  source 1..20: mol_type = other DNA
ttaatttttgtgggtacata

SEQ ID NO: 289100 - DNA, 20 bp, synthetic construct
  source 1..20: mol_type = other DNA
tttaatttttgtgggtacat

SEQ ID NO: 289101 - DNA, 20 bp, synthetic construct
  source 1..20: mol_type = other DNA
ttttaatttttgtgggtaca

SEQ ID NO: 289102 - DNA, 20 bp, synthetic construct
  source 1..20: mol_type = other DNA
tttttaatttttgtgggtac

SEQ ID NO: 289103 - DNA, 20 bp, synthetic construct
  source 1..20: mol_type = other DNA
ttttttaatttttgtgggta

SEQ ID NO: 289104 - DNA, 20 bp, synthetic construct
  source 1..20: mol_type = other DNA
tttttttaatttttgtgggt

SEQ ID NO: 289105 - DNA, 20 bp, synthetic construct
  source 1..20: mol_type = other DNA
atttttttaatttttgtggg

SEQ ID NO: 289106 - DNA, 20 bp, synthetic construct
  source 1..20: mol_type = other DNA
tatttttttaatttttgtgg

SEQ ID NO: 289107 - DNA, 20 bp, synthetic construct
  source 1..20: mol_type = other DNA
atatttttttaatttttgtg

SEQ ID NO: 289108 - DNA, 20 bp, synthetic construct
  source 1..20: mol_type = other DNA
tatatttttttaatttttgt

SEQ ID NO: 289109 - DNA, 20 bp, synthetic construct
  source 1..20: mol_type = other DNA
atatatttttttaatttttg

SEQ ID NO: 289110 - DNA, 20 bp, synthetic construct
  source 1..20: mol_type = other DNA
aatatatttttttaattttt

SEQ ID NO: 289111 - DNA, 20 bp, synthetic construct
  source 1..20: mol_type = other DNA
aaatatatttttttaatttt

SEQ ID NO: 289112 - DNA, 20 bp, synthetic construct
  source 1..20: mol_type = other DNA
aaaatatatttttttaattt

SEQ ID NO: 289113 - DNA, 20 bp, synthetic construct
  source 1..20: mol_type = other DNA
aaaaatatatttttttaatt

SEQ ID NO: 289114 - DNA, 20 bp, synthetic construct
  source 1..20: mol_type = other DNA
aaaaaatatatttttttaat

SEQ ID NO: 289115 - DNA, 20 bp, synthetic construct
  source 1..20: mol_type = other DNA
taaaaaatatatttttttaa

SEQ ID NO: 289116 - DNA, 20 bp, synthetic construct
  source 1..20: mol_type = other DNA
ttaaaaaatatattttttta

SEQ ID NO: 289117 - DNA, 20 bp, synthetic construct
  source 1..20: mol_type = other DNA
cttaaaaaatatattttttt

SEQ ID NO: 289118 - DNA, 20 bp, synthetic construct
  source 1..20: mol_type = other DNA
ccttaaaaaatatatttttt

SEQ ID NO: 289119 - DNA, 20 bp, synthetic construct
  source 1..20: mol_type = other DNA
accttaaaaaatatattttt

SEQ ID NO: 289120 - DNA, 20 bp, synthetic construct
  source 1..20: mol_type = other DNA
caccttaaaaaatatatttt

SEQ ID NO: 289121 - DNA, 20 bp, synthetic construct
  source 1..20: mol_type = other DNA
tcaccttaaaaaatatattt

SEQ ID NO: 289122 - DNA, 20 bp, synthetic construct
  source 1..20: mol_type = other DNA
ttcaccttaaaaaatatatt

SEQ ID NO: 289123 - DNA, 20 bp, synthetic construct
  source 1..20: mol_type = other DNA
cttcaccttaaaaaatatat

SEQ ID NO: 289124 - DNA, 20 bp, synthetic construct
  source 1..20: mol_type = other DNA
tcttcaccttaaaaaatata

SEQ ID NO: 289125 - DNA, 20 bp, synthetic construct
  source 1..20: mol_type = other DNA
ctcttcaccttaaaaaatat

SEQ ID NO: 289126 - DNA, 20 bp, synthetic construct
  source 1..20: mol_type = other DNA
cctcttcaccttaaaaaata

SEQ ID NO: 289127 - DNA, 20 bp, synthetic construct
  source 1..20: mol_type = other DNA
ccctcttcaccttaaaaaat

SEQ ID NO: 289128 - DNA, 20 bp, synthetic construct
  source 1..20: mol_type = other DNA
tccctcttcaccttaaaaaa

SEQ ID NO: 289129 - DNA, 20 bp, synthetic construct
  source 1..20: mol_type = other DNA
ctccctcttcaccttaaaaa

SEQ ID NO: 289130 - DNA, 20 bp, synthetic construct
  source 1..20: mol_type = other DNA
cctccctcttcaccttaaaa

SEQ ID NO: 289131 - DNA, 20 bp, synthetic construct
  source 1..20: mol_type = other DNA
gcctccctcttcaccttaaa

SEQ ID NO: 289132 - DNA, 20 bp, synthetic construct
  source 1..20: mol_type = other DNA
cgcctccctcttcaccttaa

SEQ ID NO: 289133 - DNA, 20 bp, synthetic construct
  source 1..20: mol_type = other DNA
tcgcctccctcttcacctta

SEQ ID NO: 289134 - DNA, 20 bp, synthetic construct
  source 1..20: mol_type = other DNA
ctcgcctccctcttcacctt

SEQ ID NO: 289135 - DNA, 20 bp, synthetic construct
  source 1..20: mol_type = other DNA
tctcgcctccctcttcacct

SEQ ID NO: 289136 - DNA, 20 bp, synthetic construct
  source 1..20: mol_type = other DNA
atctcgcctccctcttcacc

SEQ ID NO: 289137 - DNA, 20 bp, synthetic construct
  source 1..20: mol_type = other DNA
catctcgcctccctcttcac

SEQ ID NO: 289138 - DNA, 20 bp, synthetic construct
  source 1..20: mol_type = other DNA
gcatctcgcctccctcttca

SEQ ID NO: 289139 - DNA, 20 bp, synthetic construct
  source 1..20: mol_type = other DNA
agcatctcgcctccctcttc

SEQ ID NO: 289140 - DNA, 20 bp, synthetic construct
  source 1..20: mol_type = other DNA
cagcatctcgcctccctctt

SEQ ID NO: 289141 - DNA, 20 bp, synthetic construct
  source 1..20: mol_type = other DNA
ccagcatctcgcctccctct

SEQ ID NO: 289142 - DNA, 20 bp, synthetic construct
  source 1..20: mol_type = other DNA
gccagcatctcgcctccctc

SEQ ID NO: 289143 - DNA, 20 bp, synthetic construct
  source 1..20: mol_type = other DNA
ggccagcatctcgcctccct

SEQ ID NO: 289144 - DNA, 20 bp, synthetic construct
  source 1..20: mol_type = other DNA
aggccagcatctcgcctccc

SEQ ID NO: 289145 - DNA, 20 bp, synthetic construct
  source 1..20: mol_type = other DNA
aaggccagcatctcgcctcc

SEQ ID NO: 289146 - DNA, 20 bp, synthetic construct
  source 1..20: mol_type = other DNA
taaggccagcatctcgcctc

SEQ ID NO: 289147 - DNA, 20 bp, synthetic construct
  source 1..20: mol_type = other DNA
ttaaggccagcatctcgcct

SEQ ID NO: 289148 - DNA, 20 bp, synthetic construct
  source 1..20: mol_type = other DNA
gttaaggccagcatctcgcc

SEQ ID NO: 289149 - DNA, 20 bp, synthetic construct
  source 1..20: mol_type = other DNA
ggttaaggccagcatctcgc

SEQ ID NO: 289150 - DNA, 20 bp, synthetic construct
  source 1..20: mol_type = other DNA
gggttaaggccagcatctcg

SEQ ID NO: 289151 - DNA, 20 bp, synthetic construct
  source 1..20: mol_type = other DNA
ggggttaaggccagcatctc

SEQ ID NO: 289152 - DNA, 20 bp, synthetic construct
  source 1..20: mol_type = other DNA
aggggttaaggccagcatct

SEQ ID NO: 289153 - DNA, 20 bp, synthetic construct
  source 1..20: mol_type = other DNA
taggggttaaggccagcatc

SEQ ID NO: 289154 - DNA, 20 bp, synthetic construct
  source 1..20: mol_type = other DNA
ttaggggttaaggccagcat

SEQ ID NO: 289155 - DNA, 20 bp, synthetic construct
  source 1..20: mol_type = other DNA
gttaggggttaaggccagca

SEQ ID NO: 289156 - DNA, 20 bp, synthetic construct
  source 1..20: mol_type = other DNA
ggttaggggttaaggccagc

SEQ ID NO: 289157 - DNA, 20 bp, synthetic construct
  source 1..20: mol_type = other DNA
gggttaggggttaaggccag

SEQ ID NO: 289158 - DNA, 20 bp, synthetic construct
  source 1..20: mol_type = other DNA
cgggttaggggttaaggcca

SEQ ID NO: 289159 - DNA, 20 bp, synthetic construct
  source 1..20: mol_type = other DNA
acgggttaggggttaaggcc

SEQ ID NO: 289160 - DNA, 20 bp, synthetic construct
  source 1..20: mol_type = other DNA
aacgggttaggggttaaggc

SEQ ID NO: 289161 - DNA, 20 bp, synthetic construct
  source 1..20: mol_type = other DNA
caacgggttaggggttaagg

SEQ ID NO: 289162 - DNA, 20 bp, synthetic construct
  source 1..20: mol_type = other DNA
acaacgggttaggggttaag

SEQ ID NO: 289163 - DNA, 20 bp, synthetic construct
  source 1..20: mol_type = other DNA
aacaacgggttaggggttaa

SEQ ID NO: 289164 - DNA, 20 bp, synthetic construct
  source 1..20: mol_type = other DNA
gaacaacgggttaggggtta

SEQ ID NO: 289165 - DNA, 20 bp, synthetic construct
  source 1..20: mol_type = other DNA
agaacaacgggttaggggtt

SEQ ID NO: 289166 - DNA, 20 bp, synthetic construct
  source 1..20: mol_type = other DNA
gagaacaacgggttaggggt

SEQ ID NO: 289167 - DNA, 20 bp, synthetic construct
  source 1..20: mol_type = other DNA
ggagaacaacgggttagggg

SEQ ID NO: 289168 - DNA, 20 bp, synthetic construct
  source 1..20: mol_type = other DNA
gggagaacaacgggttaggg

SEQ ID NO: 289169 - DNA, 20 bp, synthetic construct
  source 1..20: mol_type = other DNA
agggagaacaacgggttagg

SEQ ID NO: 289170 - DNA, 20 bp, synthetic construct
  source 1..20: mol_type = other DNA
cagggagaacaacgggttag

SEQ ID NO: 289171 - DNA, 20 bp, synthetic construct
  source 1..20: mol_type = other DNA
gcagggagaacaacgggtta

SEQ ID NO: 289172 - DNA, 20 bp, synthetic construct
  source 1..20: mol_type = other DNA
tgcagggagaacaacgggtt

SEQ ID NO: 289173 - DNA, 20 bp, synthetic construct
  source 1..20: mol_type = other DNA
ttgcagggagaacaacgggt

SEQ ID NO: 289174 - DNA, 20 bp, synthetic construct
  source 1..20: mol_type = other DNA
cttgcagggagaacaacggg

SEQ ID NO: 289175 - DNA, 20 bp, synthetic construct
  source 1..20: mol_type = other DNA
gcttgcagggagaacaacgg

SEQ ID NO: 289176 - DNA, 20 bp, synthetic construct
  source 1..20: mol_type = other DNA
agcttgcagggagaacaacg

SEQ ID NO: 289177 - DNA, 20 bp, synthetic construct
  source 1..20: mol_type = other DNA
cagcttgcagggagaacaac

SEQ ID NO: 289178 - DNA, 20 bp, synthetic construct
  source 1..20: mol_type = other DNA
acagcttgcagggagaacaa

SEQ ID NO: 289179 - DNA, 20 bp, synthetic construct
  source 1..20: mol_type = other DNA
gacagcttgcagggagaaca

SEQ ID NO: 289180 - DNA, 20 bp, synthetic construct
  source 1..20: mol_type = other DNA
ggacagcttgcagggagaac

SEQ ID NO: 289181 - DNA, 20 bp, synthetic construct
  source 1..20: mol_type = other DNA
tggacagcttgcagggagaa

SEQ ID NO: 289182 - DNA, 20 bp, synthetic construct
  source 1..20: mol_type = other DNA
gtggacagcttgcagggaga

SEQ ID NO: 289183 - DNA, 20 bp, synthetic construct
  source 1..20: mol_type = other DNA
tgtggacagcttgcagggag

SEQ ID NO: 289184 - DNA, 20 bp, synthetic construct
  source 1..20: mol_type = other DNA
ctgtggacagcttgcaggga

SEQ ID NO: 289185 - DNA, 20 bp, synthetic construct
  source 1..20: mol_type = other DNA
cctgtggacagcttgcaggg

SEQ ID NO: 289186 - DNA, 20 bp, synthetic construct
  source 1..20: mol_type = other DNA
ccctgtggacagcttgcagg

SEQ ID NO: 289187 - DNA, 20 bp, synthetic construct
  source 1..20: mol_type = other DNA
gccctgtggacagcttgcag

SEQ ID NO: 289188 - DNA, 20 bp, synthetic construct
  source 1..20: mol_type = other DNA
ggccctgtggacagcttgca

SEQ ID NO: 289189 - DNA, 20 bp, synthetic construct
  source 1..20: mol_type = other DNA
aggccctgtggacagcttgc

SEQ ID NO: 289190 - DNA, 20 bp, synthetic construct
  source 1..20: mol_type = other DNA
gaggccctgtggacagcttg

SEQ ID NO: 289191 - DNA, 20 bp, synthetic construct
  source 1..20: mol_type = other DNA
agaggccctgtggacagctt

SEQ ID NO: 289192 - DNA, 20 bp, synthetic construct
  source 1..20: mol_type = other DNA
gagaggccctgtggacagct

SEQ ID NO: 289193 - DNA, 20 bp, synthetic construct
  source 1..20: mol_type = other DNA
tgagaggccctgtggacagc

SEQ ID NO: 289194 - DNA, 20 bp, synthetic construct
  source 1..20: mol_type = other DNA
ctgagaggccctgtggacag

SEQ ID NO: 289195 - DNA, 20 bp, synthetic construct
  source 1..20: mol_type = other DNA
tctgagaggccctgtggaca

SEQ ID NO: 289196 - DNA, 20 bp, synthetic construct
  source 1..20: mol_type = other DNA
gtctgagaggccctgtggac

SEQ ID NO: 289197 - DNA, 20 bp, synthetic construct
  source 1..20: mol_type = other DNA
agtctgagaggccctgtgga

SEQ ID NO: 289198 - DNA, 20 bp, synthetic construct
  source 1..20: mol_type = other DNA
gagtctgagaggccctgtgg

SEQ ID NO: 289199 - DNA, 20 bp, synthetic construct
  source 1..20: mol_type = other DNA
cgagtctgagaggccctgtg

SEQ ID NO: 289200 - DNA, 20 bp, synthetic construct
  source 1..20: mol_type = other DNA
tcgagtctgagaggccctgt

SEQ ID NO: 289201 - DNA, 20 bp, synthetic construct
  source 1..20: mol_type = other DNA
ctcgagtctgagaggccctg

SEQ ID NO: 289202 - DNA, 20 bp, synthetic construct
  source 1..20: mol_type = other DNA
cctcgagtctgagaggccct

SEQ ID NO: 289203 - DNA, 20 bp, synthetic construct
  source 1..20: mol_type = other DNA
acctcgagtctgagaggccc

SEQ ID NO: 289204 - DNA, 20 bp, synthetic construct
  source 1..20: mol_type = other DNA
aacctcgagtctgagaggcc

SEQ ID NO: 289205 - DNA, 20 bp, synthetic construct
  source 1..20: mol_type = other DNA
gaacctcgagtctgagaggc

SEQ ID NO: 289206 - DNA, 20 bp, synthetic construct
  source 1..20: mol_type = other DNA
tgaacctcgagtctgagagg

SEQ ID NO: 289207 - DNA, 20 bp, synthetic construct
  source 1..20: mol_type = other DNA
ctgaacctcgagtctgagag

SEQ ID NO: 289208 - DNA, 20 bp, synthetic construct
  source 1..20: mol_type = other DNA
gctgaacctcgagtctgaga

SEQ ID NO: 289209 - DNA, 20 bp, synthetic construct
  source 1..20: mol_type = other DNA
agctgaacctcgagtctgag

SEQ ID NO: 289210 - DNA, 20 bp, synthetic construct
  source 1..20: mol_type = other DNA
tagctgaacctcgagtctga

SEQ ID NO: 289211 - DNA, 20 bp, synthetic construct
  source 1..20: mol_type = other DNA
atagctgaacctcgagtctg

SEQ ID NO: 289212 - DNA, 20 bp, synthetic construct
  source 1..20: mol_type = other DNA
tatagctgaacctcgagtct

SEQ ID NO: 289213 - DNA, 20 bp, synthetic construct
  source 1..20: mol_type = other DNA
atatagctgaacctcgagtc

SEQ ID NO: 289214 - DNA, 20 bp, synthetic construct
  source 1..20: mol_type = other DNA
catatagctgaacctcgagt

SEQ ID NO: 289215 - DNA, 20 bp, synthetic construct
  source 1..20: mol_type = other DNA
ccatatagctgaacctcgag

SEQ ID NO: 289216 - DNA, 20 bp, synthetic construct
  source 1..20: mol_type = other DNA
tccatatagctgaacctcga

SEQ ID NO: 289217 - DNA, 20 bp, synthetic construct
  source 1..20: mol_type = other DNA
atccatatagctgaacctcg

SEQ ID NO: 289218 - DNA, 20 bp, synthetic construct
  source 1..20: mol_type = other DNA
catccatatagctgaacctc

SEQ ID NO: 289219 - DNA, 20 bp, synthetic construct
  source 1..20: mol_type = other DNA
gcatccatatagctgaacct

SEQ ID NO: 289220 - DNA, 20 bp, synthetic construct
  source 1..20: mol_type = other DNA
tgcatccatatagctgaacc

SEQ ID NO: 289221 - DNA, 20 bp, synthetic construct
  source 1..20: mol_type = other DNA
atgcatccatatagctgaac

SEQ ID NO: 289222 - DNA, 20 bp, synthetic construct
  source 1..20: mol_type = other DNA
catgcatccatatagctgaa

SEQ ID NO: 289223 - DNA, 20 bp, synthetic construct
  source 1..20: mol_type = other DNA
tcatgcatccatatagctga

SEQ ID NO: 289224 - DNA, 20 bp, synthetic construct
  source 1..20: mol_type = other DNA
ctcatgcatccatatagctg

SEQ ID NO: 289225 - DNA, 20 bp, synthetic construct
  source 1..20: mol_type = other DNA
gctcatgcatccatatagct

SEQ ID NO: 289226 - DNA, 20 bp, synthetic construct
  source 1..20: mol_type = other DNA
agctcatgcatccatatagc

SEQ ID NO: 289227 - DNA, 20 bp, synthetic construct
  source 1..20: mol_type = other DNA
aagctcatgcatccatatag

SEQ ID NO: 289228 - DNA, 20 bp, synthetic construct
  source 1..20: mol_type = other DNA
caagctcatgcatccatata

SEQ ID NO: 289229 - DNA, 20 bp, synthetic construct
  source 1..20: mol_type = other DNA
ccaagctcatgcatccatat

SEQ ID NO: 289230 - DNA, 20 bp, synthetic construct
  source 1..20: mol_type = other DNA
accaagctcatgcatccata

SEQ ID NO: 289231 - DNA, 20 bp, synthetic construct
  source 1..20: mol_type = other DNA
gaccaagctcatgcatccat

SEQ ID NO: 289232 - DNA, 20 bp, synthetic construct
  source 1..20: mol_type = other DNA
ggaccaagctcatgcatcca

SEQ ID NO: 289233 - DNA, 20 bp, synthetic construct
  source 1..20: mol_type = other DNA
gggaccaagctcatgcatcc

SEQ ID NO: 289234 - DNA, 20 bp, synthetic construct
  source 1..20: mol_type = other DNA
ggggaccaagctcatgcatc

SEQ ID NO: 289235 - DNA, 20 bp, synthetic construct
  source 1..20: mol_type = other DNA
tggggaccaagctcatgcat

SEQ ID NO: 289236 - DNA, 20 bp, synthetic construct
  source 1..20: mol_type = other DNA
ctggggaccaagctcatgca

SEQ ID NO: 289237 - DNA, 20 bp, synthetic construct
  source 1..20: mol_type = other DNA
gctggggaccaagctcatgc

SEQ ID NO: 289238 - DNA, 20 bp, synthetic construct
  source 1..20: mol_type = other DNA
ggctggggaccaagctcatg

SEQ ID NO: 289239 - DNA, 20 bp, synthetic construct
  source 1..20: mol_type = other DNA
tggctggggaccaagctcat

SEQ ID NO: 289240 - DNA, 20 bp, synthetic construct
  source 1..20: mol_type = other DNA
ttggctggggaccaagctca

SEQ ID NO: 289241 - DNA, 20 bp, synthetic construct
  source 1..20: mol_type = other DNA
gttggctggggaccaagctc

SEQ ID NO: 289242 - DNA, 20 bp, synthetic construct
  source 1..20: mol_type = other DNA
tgttggctggggaccaagct

SEQ ID NO: 289243 - DNA, 20 bp, synthetic construct
  source 1..20: mol_type = other DNA
atgttggctggggaccaagc

SEQ ID NO: 289244 - DNA, 20 bp, synthetic construct
  source 1..20: mol_type = other DNA
catgttggctggggaccaag

SEQ ID NO: 289245 - DNA, 20 bp, synthetic construct
  source 1..20: mol_type = other DNA
ccatgttggctggggaccaa

SEQ ID NO: 289246 - DNA, 20 bp, synthetic construct
  source 1..20: mol_type = other DNA
cccatgttggctggggacca

SEQ ID NO: 289247 - DNA, 20 bp, synthetic construct
  source 1..20: mol_type = other DNA
tcccatgttggctggggacc

SEQ ID NO: 289248 - DNA, 20 bp, synthetic construct
  source 1..20: mol_type = other DNA
ctcccatgttggctggggac

SEQ ID NO: 289249 - DNA, 20 bp, synthetic construct
  source 1..20: mol_type = other DNA
tctcccatgttggctgggga

SEQ ID NO: 289250 - DNA, 20 bp, synthetic construct
  source 1..20: mol_type = other DNA
gtctcccatgttggctgggg

SEQ ID NO: 289251 - DNA, 20 bp, synthetic construct
  source 1..20: mol_type = other DNA
tgtctcccatgttggctggg

SEQ ID NO: 289252 - DNA, 20 bp, synthetic construct
  source 1..20: mol_type = other DNA
gtgtctcccatgttggctgg

SEQ ID NO: 289253 - DNA, 20 bp, synthetic construct
  source 1..20: mol_type = other DNA
agtgtctcccatgttggctg

SEQ ID NO: 289254 - DNA, 20 bp, synthetic construct
  source 1..20: mol_type = other DNA
aagtgtctcccatgttggct

SEQ ID NO: 289255 - DNA, 20 bp, synthetic construct
  source 1..20: mol_type = other DNA
gaagtgtctcccatgttggc

SEQ ID NO: 289256 - DNA, 20 bp, synthetic construct
  source 1..20: mol_type = other DNA
tgaagtgtctcccatgttgg

SEQ ID NO: 289257 - DNA, 20 bp, synthetic construct
  source 1..20: mol_type = other DNA
gtgaagtgtctcccatgttg

SEQ ID NO: 289258 - DNA, 20 bp, synthetic construct
  source 1..20: mol_type = other DNA
ggtgaagtgtctcccatgtt

SEQ ID NO: 289259 - DNA, 20 bp, synthetic construct
  source 1..20: mol_type = other DNA
tggtgaagtgtctcccatgt

SEQ ID NO: 289260 - DNA, 20 bp, synthetic construct
  source 1..20: mol_type = other DNA
atggtgaagtgtctcccatg

SEQ ID NO: 289261 - DNA, 20 bp, synthetic construct
  source 1..20: mol_type = other DNA
gatggtgaagtgtctcccat

SEQ ID NO: 289262 - DNA, 20 bp, synthetic construct
  source 1..20: mol_type = other DNA
cgatggtgaagtgtctccca

SEQ ID NO: 289263 - DNA, 20 bp, synthetic construct
  source 1..20: mol_type = other DNA
ccgatggtgaagtgtctccc

SEQ ID NO: 289264 - DNA, 20 bp, synthetic construct
  source 1..20: mol_type = other DNA
gccgatggtgaagtgtctcc

SEQ ID NO: 289265 - DNA, 20 bp, synthetic construct
  source 1..20: mol_type = other DNA
tgccgatggtgaagtgtctc

SEQ ID NO: 289266 - DNA, 20 bp, synthetic construct
  source 1..20: mol_type = other DNA
ctgccgatggtgaagtgtct

SEQ ID NO: 289267 - DNA, 20 bp, synthetic construct
  source 1..20: mol_type = other DNA
gctgccgatggtgaagtgtc

SEQ ID NO: 289268 - DNA, 20 bp, synthetic construct
  source 1..20: mol_type = other DNA
tgctgccgatggtgaagtgt

SEQ ID NO: 289269 - DNA, 20 bp, synthetic construct
  source 1..20: mol_type = other DNA
ctgctgccgatggtgaagtg

SEQ ID NO: 289270 - DNA, 20 bp, synthetic construct
  source 1..20: mol_type = other DNA
gctgctgccgatggtgaagt

SEQ ID NO: 289271 - DNA, 20 bp, synthetic construct
  source 1..20: mol_type = other DNA
agctgctgccgatggtgaag

SEQ ID NO: 289272 - DNA, 20 bp, synthetic construct
  source 1..20: mol_type = other DNA
tagctgctgccgatggtgaa

SEQ ID NO: 289273 - DNA, 20 bp, synthetic construct
  source 1..20: mol_type = other DNA
gtagctgctgccgatggtga

SEQ ID NO: 289274 - DNA, 20 bp, synthetic construct
  source 1..20: mol_type = other DNA
tgtagctgctgccgatggtg

SEQ ID NO: 289275 - DNA, 20 bp, synthetic construct
  source 1..20: mol_type = other DNA
ctgtagctgctgccgatggt

SEQ ID NO: 289276 - DNA, 20 bp, synthetic construct
  source 1..20: mol_type = other DNA
gctgtagctgctgccgatgg

SEQ ID NO: 289277 - DNA, 20 bp, synthetic construct
  source 1..20: mol_type = other DNA
tgctgtagctgctgccgatg

SEQ ID NO: 289278 - DNA, 20 bp, synthetic construct
  source 1..20: mol_type = other DNA
gtgctgtagctgctgccgat

SEQ ID NO: 289279 - DNA, 20 bp, synthetic construct
  source 1..20: mol_type = other DNA
tgtgctgtagctgctgccga

SEQ ID NO: 289280 - DNA, 20 bp, synthetic construct
  source 1..20: mol_type = other DNA
ctgtgctgtagctgctgccg

SEQ ID NO: 289281 - DNA, 20 bp, synthetic construct
  source 1..20: mol_type = other DNA
cctgtgctgtagctgctgcc

SEQ ID NO: 289282 - DNA, 20 bp, synthetic construct
  source 1..20: mol_type = other DNA
tcctgtgctgtagctgctgc

SEQ ID NO: 289283 - DNA, 20 bp, synthetic construct
  source 1..20: mol_type = other DNA
ttcctgtgctgtagctgctg

SEQ ID NO: 289284 - DNA, 20 bp, synthetic construct
  source 1..20: mol_type = other DNA
gttcctgtgctgtagctgct

SEQ ID NO: 289285 - DNA, 20 bp, synthetic construct
  source 1..20: mol_type = other DNA
ggttcctgtgctgtagctgc

SEQ ID NO: 289286 - DNA, 20 bp, synthetic construct
  source 1..20: mol_type = other DNA
gggttcctgtgctgtagctg

SEQ ID NO: 289287 - DNA, 20 bp, synthetic construct
  source 1..20: mol_type = other DNA
agggttcctgtgctgtagct

SEQ ID NO: 289288 - DNA, 20 bp, synthetic construct
  source 1..20: mol_type = other DNA
cagggttcctgtgctgtagc

SEQ ID NO: 289289 - DNA, 20 bp, synthetic construct
  source 1..20: mol_type = other DNA
ccagggttcctgtgctgtag

SEQ ID NO: 289290 - DNA, 20 bp, synthetic construct
  source 1..20: mol_type = other DNA
cccagggttcctgtgctgta

SEQ ID NO: 289291 - DNA, 20 bp, synthetic construct
  source 1..20: mol_type = other DNA
acccagggttcctgtgctgt

SEQ ID NO: 289292 - DNA, 20 bp, synthetic construct
  source 1..20: mol_type = other DNA
gacccagggttcctgtgctg

SEQ ID NO: 289293 - DNA, 20 bp, synthetic construct
  source 1..20: mol_type = other DNA
tgacccagggttcctgtgct

SEQ ID NO: 289294 - DNA, 20 bp, synthetic construct
  source 1..20: mol_type = other DNA
gtgacccagggttcctgtgc

SEQ ID NO: 289295 - DNA, 20 bp, synthetic construct
  source 1..20: mol_type = other DNA
agtgacccagggttcctgtg

SEQ ID NO: 289296 - DNA, 20 bp, synthetic construct
  source 1..20: mol_type = other DNA
cagtgacccagggttcctgt

SEQ ID NO: 289297 - DNA, 20 bp, synthetic construct
  source 1..20: mol_type = other DNA
gcagtgacccagggttcctg

SEQ ID NO: 289298 - DNA, 20 bp, synthetic construct
  source 1..20: mol_type = other DNA
ggcagtgacccagggttcct

SEQ ID NO: 289299 - DNA, 20 bp, synthetic construct
  source 1..20: mol_type = other DNA
tggcagtgacccagggttcc

SEQ ID NO: 289300 - DNA, 20 bp, synthetic construct
  source 1..20: mol_type = other DNA
atggcagtgacccagggttc

SEQ ID NO: 289301 - DNA, 20 bp, synthetic construct
  source 1..20: mol_type = other DNA
catggcagtgacccagggtt

SEQ ID NO: 289302 - DNA, 20 bp, synthetic construct
  source 1..20: mol_type = other DNA
acatggcagtgacccagggt

SEQ ID NO: 289303 - DNA, 20 bp, synthetic construct
  source 1..20: mol_type = other DNA
gacatggcagtgacccaggg

SEQ ID NO: 289304 - DNA, 20 bp, synthetic construct
  source 1..20: mol_type = other DNA
ggacatggcagtgacccagg

SEQ ID NO: 289305 - DNA, 20 bp, synthetic construct
  source 1..20: mol_type = other DNA
gggacatggcagtgacccag

SEQ ID NO: 289306 - DNA, 20 bp, synthetic construct
  source 1..20: mol_type = other DNA
ggggacatggcagtgaccca

SEQ ID NO: 289307 - DNA, 20 bp, synthetic construct
  source 1..20: mol_type = other DNA
aggggacatggcagtgaccc

SEQ ID NO: 289308 - DNA, 20 bp, synthetic construct
  source 1..20: mol_type = other DNA
gaggggacatggcagtgacc

SEQ ID NO: 289309 - DNA, 20 bp, synthetic construct
  source 1..20: mol_type = other DNA
agaggggacatggcagtgac

SEQ ID NO: 289310 - DNA, 20 bp, synthetic construct
  source 1..20: mol_type = other DNA
cagaggggacatggcagtga

SEQ ID NO: 289311 - DNA, 20 bp, synthetic construct
  source 1..20: mol_type = other DNA
acagaggggacatggcagtg

SEQ ID NO: 289312 - DNA, 20 bp, synthetic construct
  source 1..20: mol_type = other DNA
cacagaggggacatggcagt

SEQ ID NO: 289313 - DNA, 20 bp, synthetic construct
  source 1..20: mol_type = other DNA
tcacagaggggacatggcag

SEQ ID NO: 289314 - DNA, 20 bp, synthetic construct
  source 1..20: mol_type = other DNA
gtcacagaggggacatggca

SEQ ID NO: 289315 - DNA, 20 bp, synthetic construct
  source 1..20: mol_type = other DNA
agtcacagaggggacatggc

SEQ ID NO: 289316 - DNA, 20 bp, synthetic construct
  source 1..20: mol_type = other DNA
aagtcacagaggggacatgg

SEQ ID NO: 289317 - DNA, 20 bp, synthetic construct
  source 1..20: mol_type = other DNA
aaagtcacagaggggacatg

SEQ ID NO: 289318 - DNA, 20 bp, synthetic construct
  source 1..20: mol_type = other DNA
caaagtcacagaggggacat

SEQ ID NO: 289319 - DNA, 20 bp, synthetic construct
  source 1..20: mol_type = other DNA
acaaagtcacagaggggaca

SEQ ID NO: 289320 - DNA, 20 bp, synthetic construct
  source 1..20: mol_type = other DNA
aacaaagtcacagaggggac

SEQ ID NO: 289321 - DNA, 20 bp, synthetic construct
  source 1..20: mol_type = other DNA
aaacaaagtcacagagggga

SEQ ID NO: 289322 - DNA, 20 bp, synthetic construct
  source 1..20: mol_type = other DNA
taaacaaagtcacagagggg

SEQ ID NO: 289323 - DNA, 20 bp, synthetic construct
  source 1..20: mol_type = other DNA
ttaaacaaagtcacagaggg

SEQ ID NO: 289324 - DNA, 20 bp, synthetic construct
  source 1..20: mol_type = other DNA
tttaaacaaagtcacagagg

SEQ ID NO: 289325 - DNA, 20 bp, synthetic construct
  source 1..20: mol_type = other DNA
gtttaaacaaagtcacagag

SEQ ID NO: 289326 - DNA, 20 bp, synthetic construct
  source 1..20: mol_type = other DNA
tgtttaaacaaagtcacaga

SEQ ID NO: 289327 - DNA, 20 bp, synthetic construct
  source 1..20: mol_type = other DNA
ctgtttaaacaaagtcacag

SEQ ID NO: 289328 - DNA, 20 bp, synthetic construct
  source 1..20: mol_type = other DNA
tctgtttaaacaaagtcaca

SEQ ID NO: 289329 - DNA, 20 bp, synthetic construct
  source 1..20: mol_type = other DNA
ttctgtttaaacaaagtcac

SEQ ID NO: 289330 - DNA, 20 bp, synthetic construct
  source 1..20: mol_type = other DNA
tttctgtttaaacaaagtca

SEQ ID NO: 289331 - DNA, 20 bp, synthetic construct
  source 1..20: mol_type = other DNA
ttttctgtttaaacaaagtc

SEQ ID NO: 289332 - DNA, 20 bp, synthetic construct
  source 1..20: mol_type = other DNA
attttctgtttaaacaaagt

SEQ ID NO: 289333 - DNA, 20 bp, synthetic construct
  source 1..20: mol_type = other DNA
cattttctgtttaaacaaag

SEQ ID NO: 289334 - DNA, 20 bp, synthetic construct
  source 1..20: mol_type = other DNA
tcattttctgtttaaacaaa

SEQ ID NO: 289335 - DNA, 20 bp, synthetic construct
  source 1..20: mol_type = other DNA
atcattttctgtttaaacaa

SEQ ID NO: 289336 - DNA, 20 bp, synthetic construct
  source 1..20: mol_type = other DNA
catcattttctgtttaaaca

SEQ ID NO: 289337 - DNA, 20 bp, synthetic construct
  source 1..20: mol_type = other DNA
gcatcattttctgtttaaac

SEQ ID NO: 289338 - DNA, 20 bp, synthetic construct
  source 1..20: mol_type = other DNA
agcatcattttctgtttaaa

SEQ ID NO: 289339 - DNA, 20 bp, synthetic construct
  source 1..20: mol_type = other DNA
gagcatcattttctgtttaa

SEQ ID NO: 289340 - DNA, 20 bp, synthetic construct
  source 1..20: mol_type = other DNA
agagcatcattttctgttta

SEQ ID NO: 289341 - DNA, 20 bp, synthetic construct
  source 1..20: mol_type = other DNA
cagagcatcattttctgttt

SEQ ID NO: 289342 - DNA, 20 bp, synthetic construct
  source 1..20: mol_type = other DNA
ccagagcatcattttctgtt

SEQ ID NO: 289343 - DNA, 20 bp, synthetic construct
  source 1..20: mol_type = other DNA
cccagagcatcattttctgt

SEQ ID NO: 289344 - DNA, 20 bp, synthetic construct
  source 1..20: mol_type = other DNA
gcccagagcatcattttctg

SEQ ID NO: 289345 - DNA, 20 bp, synthetic construct
  source 1..20: mol_type = other DNA
ggcccagagcatcattttct

SEQ ID NO: 289346 - DNA, 20 bp, synthetic construct
  source 1..20: mol_type = other DNA
cggcccagagcatcattttc

SEQ ID NO: 289347 - DNA, 20 bp, synthetic construct
  source 1..20: mol_type = other DNA
ccggcccagagcatcatttt

SEQ ID NO: 289348 - DNA, 20 bp, synthetic construct
  source 1..20: mol_type = other DNA
gccggcccagagcatcattt

SEQ ID NO: 289349 - DNA, 20 bp, synthetic construct
  source 1..20: mol_type = other DNA
agccggcccagagcatcatt

SEQ ID NO: 289350 - DNA, 20 bp, synthetic construct
  source 1..20: mol_type = other DNA
cagccggcccagagcatcat

SEQ ID NO: 289351 - DNA, 20 bp, synthetic construct
  source 1..20: mol_type = other DNA
acagccggcccagagcatca

SEQ ID NO: 289352 - DNA, 20 bp, synthetic construct
  source 1..20: mol_type = other DNA
cacagccggcccagagcatc

SEQ ID NO: 289353 - DNA, 20 bp, synthetic construct
  source 1..20: mol_type = other DNA
ccacagccggcccagagcat

SEQ ID NO: 289354 - DNA, 20 bp, synthetic construct
  source 1..20: mol_type = other DNA
accacagccggcccagagca

SEQ ID NO: 289355 - DNA, 20 bp, synthetic construct
  source 1..20: mol_type = other DNA
caccacagccggcccagagc

SEQ ID NO: 289356 - DNA, 20 bp, synthetic construct
  source 1..20: mol_type = other DNA
ccaccacagccggcccagag

SEQ ID NO: 289357 - DNA, 20 bp, synthetic construct
  source 1..20: mol_type = other DNA
gccaccacagccggcccaga

SEQ ID NO: 289358 - DNA, 20 bp, synthetic construct
  source 1..20: mol_type = other DNA
ggccaccacagccggcccag

SEQ ID NO: 289359 - DNA, 20 bp, synthetic construct
  source 1..20: mol_type = other DNA
gggccaccacagccggccca

SEQ ID NO: 289360 - DNA, 20 bp, synthetic construct
  source 1..20: mol_type = other DNA
tgggccaccacagccggccc

SEQ ID NO: 289361 - DNA, 20 bp, synthetic construct
  source 1..20: mol_type = other DNA
gtgggccaccacagccggcc

SEQ ID NO: 289362 - DNA, 20 bp, synthetic construct
  source 1..20: mol_type = other DNA
tgtgggccaccacagccggc

SEQ ID NO: 289363 - DNA, 20 bp, synthetic construct
  source 1..20: mol_type = other DNA
gtgtgggccaccacagccgg

SEQ ID NO: 289364 - DNA, 20 bp, synthetic construct
  source 1..20: mol_type = other DNA
ggtgtgggccaccacagccg

SEQ ID NO: 289365 - DNA, 20 bp, synthetic construct
  source 1..20: mol_type = other DNA
aggtgtgggccaccacagcc

SEQ ID NO: 289366 - DNA, 20 bp, synthetic construct
  source 1..20: mol_type = other DNA
taggtgtgggccaccacagc

SEQ ID NO: 289367 - DNA, 20 bp, synthetic construct
  source 1..20: mol_type = other DNA
ataggtgtgggccaccacag

SEQ ID NO: 289368 - DNA, 20 bp, synthetic construct
  source 1..20: mol_type = other DNA
tataggtgtgggccaccaca

SEQ ID NO: 289369 - DNA, 20 bp, synthetic construct
  source 1..20: mol_type = other DNA
ttataggtgtgggccaccac

SEQ ID NO: 289370 - DNA, 20 bp, synthetic construct
  source 1..20: mol_type = other DNA
attataggtgtgggccacca

SEQ ID NO: 289371 - DNA, 20 bp, synthetic construct
  source 1..20: mol_type = other DNA
gattataggtgtgggccacc

SEQ ID NO: 289372 - DNA, 20 bp, synthetic construct
  source 1..20: mol_type = other DNA
ggattataggtgtgggccac

SEQ ID NO: 289373 - DNA, 20 bp, synthetic construct
  source 1..20: mol_type = other DNA
gggattataggtgtgggcca

SEQ ID NO: 289374 - DNA, 20 bp, synthetic construct
  source 1..20: mol_type = other DNA
tgggattataggtgtgggcc

SEQ ID NO: 289375 - DNA, 20 bp, synthetic construct
  source 1..20: mol_type = other DNA
ctgggattataggtgtgggc

SEQ ID NO: 289376 - DNA, 20 bp, synthetic construct
  source 1..20: mol_type = other DNA
gctgggattataggtgtggg

SEQ ID NO: 289377 - DNA, 20 bp, synthetic construct
  source 1..20: mol_type = other DNA
tgctgggattataggtgtgg

SEQ ID NO: 289378 - DNA, 20 bp, synthetic construct
  source 1..20: mol_type = other DNA
gtgctgggattataggtgtg

SEQ ID NO: 289379 - DNA, 20 bp, synthetic construct
  source 1..20: mol_type = other DNA
ggtgctgggattataggtgt

SEQ ID NO: 289380 - DNA, 20 bp, synthetic construct
  source 1..20: mol_type = other DNA
aggtgctgggattataggtg

SEQ ID NO: 289381 - DNA, 20 bp, synthetic construct
  source 1..20: mol_type = other DNA
aaggtgctgggattataggt

SEQ ID NO: 289382 - DNA, 20 bp, synthetic construct
  source 1..20: mol_type = other DNA
caaggtgctgggattatagg

SEQ ID NO: 289383 - DNA, 20 bp, synthetic construct
  source 1..20: mol_type = other DNA
ccaaggtgctgggattatag

SEQ ID NO: 289384 - DNA, 20 bp, synthetic construct
  source 1..20: mol_type = other DNA
cccaaggtgctgggattata

SEQ ID NO: 289385 - DNA, 20 bp, synthetic construct
  source 1..20: mol_type = other DNA
tcccaaggtgctgggattat

SEQ ID NO: 289386 - DNA, 20 bp, synthetic construct
  source 1..20: mol_type = other DNA
ctcccaaggtgctgggatta

SEQ ID NO: 289387 - DNA, 20 bp, synthetic construct
  source 1..20: mol_type = other DNA
cctcccaaggtgctgggatt

SEQ ID NO: 289388 - DNA, 20 bp, synthetic construct
  source 1..20: mol_type = other DNA
gcctcccaaggtgctgggat

SEQ ID NO: 289389 - DNA, 20 bp, synthetic construct
  source 1..20: mol_type = other DNA
cgcctcccaaggtgctggga

SEQ ID NO: 289390 - DNA, 20 bp, synthetic construct
  source 1..20: mol_type = other DNA
ccgcctcccaaggtgctggg

SEQ ID NO: 289391 - DNA, 20 bp, synthetic construct
  source 1..20: mol_type = other DNA
cccgcctcccaaggtgctgg

SEQ ID NO: 289392 - DNA, 20 bp, synthetic construct
  source 1..20: mol_type = other DNA
ccccgcctcccaaggtgctg

SEQ ID NO: 289393 - DNA, 20 bp, synthetic construct
  source 1..20: mol_type = other DNA
cccccgcctcccaaggtgct

SEQ ID NO: 289394 - DNA, 20 bp, synthetic construct
  source 1..20: mol_type = other DNA
acccccgcctcccaaggtgc

SEQ ID NO: 289395 - DNA, 20 bp, synthetic construct
  source 1..20: mol_type = other DNA
cacccccgcctcccaaggtg

SEQ ID NO: 289396 - DNA, 20 bp, synthetic construct
  source 1..20: mol_type = other DNA
ccacccccgcctcccaaggt

SEQ ID NO: 289397 - DNA, 20 bp, synthetic construct
  source 1..20: mol_type = other DNA
cccacccccgcctcccaagg

SEQ ID NO: 289398 - DNA, 20 bp, synthetic construct
  source 1..20: mol_type = other DNA
gcccacccccgcctcccaag

SEQ ID NO: 289399 - DNA, 20 bp, synthetic construct
  source 1..20: mol_type = other DNA
tgcccacccccgcctcccaa

SEQ ID NO: 289400 - DNA, 20 bp, synthetic construct
  source 1..20: mol_type = other DNA
ctgcccacccccgcctccca

SEQ ID NO: 289401 - DNA, 20 bp, synthetic construct
  source 1..20: mol_type = other DNA
tctgcccacccccgcctccc

SEQ ID NO: 289402 - DNA, 20 bp, synthetic construct
  source 1..20: mol_type = other DNA
atctgcccacccccgcctcc

SEQ ID NO: 289403 - DNA, 20 bp, synthetic construct
  source 1..20: mol_type = other DNA
aatctgcccacccccgcctc

SEQ ID NO: 289404 - DNA, 20 bp, synthetic construct
  source 1..20: mol_type = other DNA
caatctgcccacccccgcct

SEQ ID NO: 289405 - DNA, 20 bp, synthetic construct
  source 1..20: mol_type = other DNA
gcaatctgcccacccccgcc

SEQ ID NO: 289406 - DNA, 20 bp, synthetic construct
  source 1..20: mol_type = other DNA
ggcaatctgcccacccccgc

SEQ ID NO: 289407 - DNA, 20 bp, synthetic construct
  source 1..20: mol_type = other DNA
aggcaatctgcccacccccg

SEQ ID NO: 289408 - DNA, 20 bp, synthetic construct
  source 1..20: mol_type = other DNA
caggcaatctgcccaccccc

SEQ ID NO: 289409 - DNA, 20 bp, synthetic construct
  source 1..20: mol_type = other DNA
tcaggcaatctgcccacccc

SEQ ID NO: 289410 - DNA, 20 bp, synthetic construct
  source 1..20: mol_type = other DNA
ctcaggcaatctgcccaccc

SEQ ID NO: 289411 - DNA, 20 bp, synthetic construct
  source 1..20: mol_type = other DNA
cctcaggcaatctgcccacc

SEQ ID NO: 289412 - DNA, 20 bp, synthetic construct
  source 1..20: mol_type = other DNA
acctcaggcaatctgcccac

SEQ ID NO: 289413 - DNA, 20 bp, synthetic construct
  source 1..20: mol_type = other DNA
gacctcaggcaatctgccca

SEQ ID NO: 289414 - DNA, 20 bp, synthetic construct
  source 1..20: mol_type = other DNA
tgacctcaggcaatctgccc

SEQ ID NO: 289415 - DNA, 20 bp, synthetic construct
  source 1..20: mol_type = other DNA
ctgacctcaggcaatctgcc

SEQ ID NO: 289416 - DNA, 20 bp, synthetic construct
  source 1..20: mol_type = other DNA
cctgacctcaggcaatctgc

SEQ ID NO: 289417 - DNA, 20 bp, synthetic construct
  source 1..20: mol_type = other DNA
tcctgacctcaggcaatctg

SEQ ID NO: 289418 - DNA, 20 bp, synthetic construct
  source 1..20: mol_type = other DNA
ctcctgacctcaggcaatct

SEQ ID NO: 289419 - DNA, 20 bp, synthetic construct
  source 1..20: mol_type = other DNA
actcctgacctcaggcaatc

SEQ ID NO: 289420 - DNA, 20 bp, synthetic construct
  source 1..20: mol_type = other DNA
aactcctgacctcaggcaat

SEQ ID NO: 289421 - DNA, 20 bp, synthetic construct
  source 1..20: mol_type = other DNA
caactcctgacctcaggcaa

SEQ ID NO: 289422 - DNA, 20 bp, synthetic construct
  source 1..20: mol_type = other DNA
ccaactcctgacctcaggca

SEQ ID NO: 289423 - DNA, 20 bp, synthetic construct
  source 1..20: mol_type = other DNA
tccaactcctgacctcaggc

SEQ ID NO: 289424 - DNA, 20 bp, synthetic construct
  source 1..20: mol_type = other DNA
ctccaactcctgacctcagg

SEQ ID NO: 289425 - DNA, 20 bp, synthetic construct
  source 1..20: mol_type = other DNA
tctccaactcctgacctcag

SEQ ID NO: 289426 - DNA, 20 bp, synthetic construct
  source 1..20: mol_type = other DNA
atctccaactcctgacctca

SEQ ID NO: 289427 - DNA, 20 bp, synthetic construct
  source 1..20: mol_type = other DNA
gatctccaactcctgacctc

SEQ ID NO: 289428 - DNA, 20 bp, synthetic construct
  source 1..20: mol_type = other DNA
tgatctccaactcctgacct

SEQ ID NO: 289429 - DNA, 20 bp, synthetic construct
  source 1..20: mol_type = other DNA
ctgatctccaactcctgacc

SEQ ID NO: 289430 - DNA, 20 bp, synthetic construct
  source 1..20: mol_type = other DNA
gctgatctccaactcctgac

SEQ ID NO: 289431 - DNA, 20 bp, synthetic construct
  source 1..20: mol_type = other DNA
ggctgatctccaactcctga

SEQ ID NO: 289432 - DNA, 20 bp, synthetic construct
  source 1..20: mol_type = other DNA
aggctgatctccaactcctg

SEQ ID NO: 289433 - DNA, 20 bp, synthetic construct
  source 1..20: mol_type = other DNA
caggctgatctccaactcct

SEQ ID NO: 289434 - DNA, 20 bp, synthetic construct
  source 1..20: mol_type = other DNA
ccaggctgatctccaactcc

SEQ ID NO: 289435 - DNA, 20 bp, synthetic construct
  source 1..20: mol_type = other DNA
gccaggctgatctccaactc

SEQ ID NO: 289436 - DNA, 20 bp, synthetic construct
  source 1..20: mol_type = other DNA
ggccaggctgatctccaact

SEQ ID NO: 289437 - DNA, 20 bp, synthetic construct
  source 1..20: mol_type = other DNA
cggccaggctgatctccaac

SEQ ID NO: 289438 - DNA, 20 bp, synthetic construct
  source 1..20: mol_type = other DNA
tcggccaggctgatctccaa

SEQ ID NO: 289439 - DNA, 20 bp, synthetic construct
  source 1..20: mol_type = other DNA
gtcggccaggctgatctcca

SEQ ID NO: 289440 - DNA, 20 bp, synthetic construct
  source 1..20: mol_type = other DNA
tgtcggccaggctgatctcc

SEQ ID NO: 289441 - DNA, 20 bp, synthetic construct
  source 1..20: mol_type = other DNA
atgtcggccaggctgatctc

SEQ ID NO: 289442 - DNA, 20 bp, synthetic construct
  source 1..20: mol_type = other DNA
catgtcggccaggctgatct

SEQ ID NO: 289443 - DNA, 20 bp, synthetic construct
  source 1..20: mol_type = other DNA
ccatgtcggccaggctgatc

SEQ ID NO: 289444 - DNA, 20 bp, synthetic construct
  source 1..20: mol_type = other DNA
gccatgtcggccaggctgat

SEQ ID NO: 289445 - DNA, 20 bp, synthetic construct
  source 1..20: mol_type = other DNA
cgccatgtcggccaggctga

SEQ ID NO: 289446 - DNA, 20 bp, synthetic construct
  source 1..20: mol_type = other DNA
tcgccatgtcggccaggctg

SEQ ID NO: 289447 - DNA, 20 bp, synthetic construct
  source 1..20: mol_type = other DNA
ttcgccatgtcggccaggct

SEQ ID NO: 289448 - DNA, 20 bp, synthetic construct
  source 1..20: mol_type = other DNA
tttcgccatgtcggccaggc

SEQ ID NO: 289449 - DNA, 20 bp, synthetic construct
  source 1..20: mol_type = other DNA
gtttcgccatgtcggccagg

SEQ ID NO: 289450 - DNA, 20 bp, synthetic construct
  source 1..20: mol_type = other DNA
ggtttcgccatgtcggccag

SEQ ID NO: 289451 - DNA, 20 bp, synthetic construct
  source 1..20: mol_type = other DNA
gggtttcgccatgtcggcca

SEQ ID NO: 289452 - DNA, 20 bp, synthetic construct
  source 1..20: mol_type = other DNA
ggggtttcgccatgtcggcc

SEQ ID NO: 289453 - DNA, 20 bp, synthetic construct
  source 1..20: mol_type = other DNA
tggggtttcgccatgtcggc

SEQ ID NO: 289454 - DNA, 20 bp, synthetic construct
  source 1..20: mol_type = other DNA
atggggtttcgccatgtcgg

SEQ ID NO: 289455 - DNA, 20 bp, synthetic construct
  source 1..20: mol_type = other DNA
catggggtttcgccatgtcg

SEQ ID NO: 289456 - DNA, 20 bp, synthetic construct
  source 1..20: mol_type = other DNA
acatggggtttcgccatgtc

SEQ ID NO: 289457 - DNA, 20 bp, synthetic construct
  source 1..20: mol_type = other DNA
gacatggggtttcgccatgt

SEQ ID NO: 289458 - DNA, 20 bp, synthetic construct
  source 1..20: mol_type = other DNA
agacatggggtttcgccatg

SEQ ID NO: 289459 - DNA, 20 bp, synthetic construct
  source 1..20: mol_type = other DNA
tagacatggggtttcgccat

SEQ ID NO: 289460 - DNA, 20 bp, synthetic construct
  source 1..20: mol_type = other DNA
gtagacatggggtttcgcca

SEQ ID NO: 289461 - DNA, 20 bp, synthetic construct
  source 1..20: mol_type = other DNA
agtagacatggggtttcgcc

SEQ ID NO: 289462 - DNA, 20 bp, synthetic construct
  source 1..20: mol_type = other DNA
tagtagacatggggtttcgc

SEQ ID NO: 289463 - DNA, 20 bp, synthetic construct
  source 1..20: mol_type = other DNA
ttagtagacatggggtttcg

SEQ ID NO: 289464 - DNA, 20 bp, synthetic construct
  source 1..20: mol_type = other DNA
tttagtagacatggggtttc

SEQ ID NO: 289465 - DNA, 20 bp, synthetic construct
  source 1..20: mol_type = other DNA
ttttagtagacatggggttt

SEQ ID NO: 289466 - DNA, 20 bp, synthetic construct
  source 1..20: mol_type = other DNA
tttttagtagacatggggtt

SEQ ID NO: 289467 - DNA, 20 bp, synthetic construct
  source 1..20: mol_type = other DNA
atttttagtagacatggggt

SEQ ID NO: 289468 - DNA, 20 bp, synthetic construct
  source 1..20: mol_type = other DNA
tatttttagtagacatgggg

SEQ ID NO: 289469 - DNA, 20 bp, synthetic construct
  source 1..20: mol_type = other DNA
gtatttttagtagacatggg

SEQ ID NO: 289470 - DNA, 20 bp, synthetic construct
  source 1..20: mol_type = other DNA
tgtatttttagtagacatgg

SEQ ID NO: 289471 - DNA, 20 bp, synthetic construct
  source 1..20: mol_type = other DNA
ttgtatttttagtagacatg

SEQ ID NO: 289472 - DNA, 20 bp, synthetic construct
  source 1..20: mol_type = other DNA
tttgtatttttagtagacat

SEQ ID NO: 289473 - DNA, 20 bp, synthetic construct
  source 1..20: mol_type = other DNA
ttttgtatttttagtagaca

SEQ ID NO: 289474 - DNA, 20 bp, synthetic construct
  source 1..20: mol_type = other DNA
tttttgtatttttagtagac

SEQ ID NO: 289475 - DNA, 20 bp, synthetic construct
  source 1..20: mol_type = other DNA
gtttttgtatttttagtaga

SEQ ID NO: 289476 - DNA, 20 bp, synthetic construct
  source 1..20: mol_type = other DNA
agtttttgtatttttagtag

SEQ ID NO: 289477 - DNA, 20 bp, synthetic construct
  source 1..20: mol_type = other DNA
tagtttttgtatttttagta

SEQ ID NO: 289478 - DNA, 20 bp, synthetic construct
  source 1..20: mol_type = other DNA
ctagtttttgtatttttagt

SEQ ID NO: 289479 - DNA, 20 bp, synthetic construct
  source 1..20: mol_type = other DNA
gctagtttttgtatttttag

SEQ ID NO: 289480 - DNA, 20 bp, synthetic construct
  source 1..20: mol_type = other DNA
ggctagtttttgtattttta

SEQ ID NO: 289481 - DNA, 20 bp, synthetic construct
  source 1..20: mol_type = other DNA
tggctagtttttgtattttt

SEQ ID NO: 289482 - DNA, 20 bp, synthetic construct
  source 1..20: mol_type = other DNA
ctggctagtttttgtatttt

SEQ ID NO: 289483 - DNA, 20 bp, synthetic construct
  source 1..20: mol_type = other DNA
cctggctagtttttgtattt

SEQ ID NO: 289484 - DNA, 20 bp, synthetic construct
  source 1..20: mol_type = other DNA
gcctggctagtttttgtatt

SEQ ID NO: 289485 - DNA, 20 bp, synthetic construct
  source 1..20: mol_type = other DNA
tgcctggctagtttttgtat

SEQ ID NO: 289486 - DNA, 20 bp, synthetic construct
  source 1..20: mol_type = other DNA
atgcctggctagtttttgta

SEQ ID NO: 289487 - DNA, 20 bp, synthetic construct
  source 1..20: mol_type = other DNA
catgcctggctagtttttgt

SEQ ID NO: 289488 - DNA, 20 bp, synthetic construct
  source 1..20: mol_type = other DNA
ccatgcctggctagtttttg

SEQ ID NO: 289489 - DNA, 20 bp, synthetic construct
  source 1..20: mol_type = other DNA
accatgcctggctagttttt

SEQ ID NO: 289490 - DNA, 20 bp, synthetic construct
  source 1..20: mol_type = other DNA
caccatgcctggctagtttt

SEQ ID NO: 289491 - DNA, 20 bp, synthetic construct
  source 1..20: mol_type = other DNA
ccaccatgcctggctagttt

SEQ ID NO: 289492 - DNA, 20 bp, synthetic construct
  source 1..20: mol_type = other DNA
gccaccatgcctggctagtt

SEQ ID NO: 289493 - DNA, 20 bp, synthetic construct
  source 1..20: mol_type = other DNA
tgccaccatgcctggctagt

SEQ ID NO: 289494 - DNA, 20 bp, synthetic construct
  source 1..20: mol_type = other DNA
gtgccaccatgcctggctag

SEQ ID NO: 289495 - DNA, 20 bp, synthetic construct
  source 1..20: mol_type = other DNA
tgtgccaccatgcctggcta

SEQ ID NO: 289496 - DNA, 20 bp, synthetic construct
  source 1..20: mol_type = other DNA
atgtgccaccatgcctggct

SEQ ID NO: 289497 - DNA, 20 bp, synthetic construct
  source 1..20: mol_type = other DNA
catgtgccaccatgcctggc

SEQ ID NO: 289498 - DNA, 20 bp, synthetic construct
  source 1..20: mol_type = other DNA
gcatgtgccaccatgcctgg

SEQ ID NO: 289499 - DNA, 20 bp, synthetic construct
  source 1..20: mol_type = other DNA
ggcatgtgccaccatgcctg

SEQ ID NO: 289500 - DNA, 20 bp, synthetic construct
  source 1..20: mol_type = other DNA
aggcatgtgccaccatgcct

SEQ ID NO: 289501 - DNA, 20 bp, synthetic construct
  source 1..20: mol_type = other DNA
caggcatgtgccaccatgcc

SEQ ID NO: 289502 - DNA, 20 bp, synthetic construct
  source 1..20: mol_type = other DNA
acaggcatgtgccaccatgc

SEQ ID NO: 289503 - DNA, 20 bp, synthetic construct
  source 1..20: mol_type = other DNA
tacaggcatgtgccaccatg

SEQ ID NO: 289504 - DNA, 20 bp, synthetic construct
  source 1..20: mol_type = other DNA
ttacaggcatgtgccaccat

SEQ ID NO: 289505 - DNA, 20 bp, synthetic construct
  source 1..20: mol_type = other DNA
attacaggcatgtgccacca

SEQ ID NO: 289506 - DNA, 20 bp, synthetic construct
  source 1..20: mol_type = other DNA
gattacaggcatgtgccacc

SEQ ID NO: 289507 - DNA, 20 bp, synthetic construct
  source 1..20: mol_type = other DNA
ggattacaggcatgtgccac

SEQ ID NO: 289508 - DNA, 20 bp, synthetic construct
  source 1..20: mol_type = other DNA
gggattacaggcatgtgcca

SEQ ID NO: 289509 - DNA, 20 bp, synthetic construct
  source 1..20: mol_type = other DNA
tgggattacaggcatgtgcc

SEQ ID NO: 289510 - DNA, 20 bp, synthetic construct
  source 1..20: mol_type = other DNA
ctgggattacaggcatgtgc

SEQ ID NO: 289511 - DNA, 20 bp, synthetic construct
  source 1..20: mol_type = other DNA
gctgggattacaggcatgtg

SEQ ID NO: 289512 - DNA, 20 bp, synthetic construct
  source 1..20: mol_type = other DNA
agctgggattacaggcatgt

SEQ ID NO: 289513 - DNA, 20 bp, synthetic construct
  source 1..20: mol_type = other DNA
tagctgggattacaggcatg

SEQ ID NO: 289514 - DNA, 20 bp, synthetic construct
  source 1..20: mol_type = other DNA
gtagctgggattacaggcat

SEQ ID NO: 289515 - DNA, 20 bp, synthetic construct
  source 1..20: mol_type = other DNA
agtagctgggattacaggca

SEQ ID NO: 289516 - DNA, 20 bp, synthetic construct
  source 1..20: mol_type = other DNA
aagtagctgggattacaggc

SEQ ID NO: 289517 - DNA, 20 bp, synthetic construct
  source 1..20: mol_type = other DNA
caagtagctgggattacagg

SEQ ID NO: 289518 - DNA, 20 bp, synthetic construct
  source 1..20: mol_type = other DNA
ccaagtagctgggattacag

SEQ ID NO: 289519 - DNA, 20 bp, synthetic construct
  source 1..20: mol_type = other DNA
cccaagtagctgggattaca

SEQ ID NO: 289520 - DNA, 20 bp, synthetic construct
  source 1..20: mol_type = other DNA
tcccaagtagctgggattac

SEQ ID NO: 289521 - DNA, 20 bp, synthetic construct
  source 1..20: mol_type = other DNA
ctcccaagtagctgggatta

SEQ ID NO: 289522 - DNA, 20 bp, synthetic construct
  source 1..20: mol_type = other DNA
cctcccaagtagctgggatt

SEQ ID NO: 289523 - DNA, 20 bp, synthetic construct
  source 1..20: mol_type = other DNA
gcctcccaagtagctgggat

SEQ ID NO: 289524 - DNA, 20 bp, synthetic construct
  source 1..20: mol_type = other DNA
agcctcccaagtagctggga

SEQ ID NO: 289525 - DNA, 20 bp, synthetic construct
  source 1..20: mol_type = other DNA
cagcctcccaagtagctggg

SEQ ID NO: 289526 - DNA, 20 bp, synthetic construct
  source 1..20: mol_type = other DNA
tcagcctcccaagtagctgg

SEQ ID NO: 289527 - DNA, 20 bp, synthetic construct
  source 1..20: mol_type = other DNA
ttcagcctcccaagtagctg

SEQ ID NO: 289528 - DNA, 20 bp, synthetic construct
  source 1..20: mol_type = other DNA
cttcagcctcccaagtagct

SEQ ID NO: 289529 - DNA, 20 bp, synthetic construct
  source 1..20: mol_type = other DNA
gcttcagcctcccaagtagc

SEQ ID NO: 289530 - DNA, 20 bp, synthetic construct
  source 1..20: mol_type = other DNA
tgcttcagcctcccaagtag

SEQ ID NO: 289531 - DNA, 20 bp, synthetic construct
  source 1..20: mol_type = other DNA
ctgcttcagcctcccaagta

SEQ ID NO: 289532 - DNA, 20 bp, synthetic construct
  source 1..20: mol_type = other DNA
cctgcttcagcctcccaagt

SEQ ID NO: 289533 - DNA, 20 bp, synthetic construct
  source 1..20: mol_type = other DNA
tcctgcttcagcctcccaag

SEQ ID NO: 289534 - DNA, 20 bp, synthetic construct
  source 1..20: mol_type = other DNA
ctcctgcttcagcctcccaa

SEQ ID NO: 289535 - DNA, 20 bp, synthetic construct
  source 1..20: mol_type = other DNA
tctcctgcttcagcctccca

SEQ ID NO: 289536 - DNA, 20 bp, synthetic construct
  source 1..20: mol_type = other DNA
ttctcctgcttcagcctccc

SEQ ID NO: 289537 - DNA, 20 bp, synthetic construct
  source 1..20: mol_type = other DNA
attctcctgcttcagcctcc

SEQ ID NO: 289538 - DNA, 20 bp, synthetic construct
  source 1..20: mol_type = other DNA
gattctcctgcttcagcctc

SEQ ID NO: 289539 - DNA, 20 bp, synthetic construct
  source 1..20: mol_type = other DNA
tgattctcctgcttcagcct

SEQ ID NO: 289540 - DNA, 20 bp, synthetic construct
  source 1..20: mol_type = other DNA
gtgattctcctgcttcagcc

SEQ ID NO: 289541 - DNA, 20 bp, synthetic construct
  source 1..20: mol_type = other DNA
agtgattctcctgcttcagc

SEQ ID NO: 289542 - DNA, 20 bp, synthetic construct
  source 1..20: mol_type = other DNA
aagtgattctcctgcttcag

SEQ ID NO: 289543 - DNA, 20 bp, synthetic construct
  source 1..20: mol_type = other DNA
caagtgattctcctgcttca

SEQ ID NO: 289544 - DNA, 20 bp, synthetic construct
  source 1..20: mol_type = other DNA
tcaagtgattctcctgcttc

SEQ ID NO: 289545 - DNA, 20 bp, synthetic construct
  source 1..20: mol_type = other DNA
ttcaagtgattctcctgctt

SEQ ID NO: 289546 - DNA, 20 bp, synthetic construct
  source 1..20: mol_type = other DNA
gttcaagtgattctcctgct

SEQ ID NO: 289547 - DNA, 20 bp, synthetic construct
  source 1..20: mol_type = other DNA
ggttcaagtgattctcctgc

SEQ ID NO: 289548 - DNA, 20 bp, synthetic construct
  source 1..20: mol_type = other DNA
gggttcaagtgattctcctg

SEQ ID NO: 289549 - DNA, 20 bp, synthetic construct
  source 1..20: mol_type = other DNA
tgggttcaagtgattctcct

SEQ ID NO: 289550 - DNA, 20 bp, synthetic construct
  source 1..20: mol_type = other DNA
ctgggttcaagtgattctcc

SEQ ID NO: 289551 - DNA, 20 bp, synthetic construct
  source 1..20: mol_type = other DNA
cctgggttcaagtgattctc

SEQ ID NO: 289552 - DNA, 20 bp, synthetic construct
  source 1..20: mol_type = other DNA
tcctgggttcaagtgattct

SEQ ID NO: 289553 - DNA, 20 bp, synthetic construct
  source 1..20: mol_type = other DNA
ctcctgggttcaagtgattc

SEQ ID NO: 289554 - DNA, 20 bp, synthetic construct
  source 1..20: mol_type = other DNA
cctcctgggttcaagtgatt

SEQ ID NO: 289555 - DNA, 20 bp, synthetic construct
  source 1..20: mol_type = other DNA
gcctcctgggttcaagtgat

SEQ ID NO: 289556 - DNA, 20 bp, synthetic construct
  source 1..20: mol_type = other DNA
tgcctcctgggttcaagtga

SEQ ID NO: 289557 - DNA, 20 bp, synthetic construct
  source 1..20: mol_type = other DNA
ctgcctcctgggttcaagtg

SEQ ID NO: 289558 - DNA, 20 bp, synthetic construct
  source 1..20: mol_type = other DNA
tctgcctcctgggttcaagt

SEQ ID NO: 289559 - DNA, 20 bp, synthetic construct
  source 1..20: mol_type = other DNA
ctctgcctcctgggttcaag

SEQ ID NO: 289560 - DNA, 20 bp, synthetic construct
  source 1..20: mol_type = other DNA
cctctgcctcctgggttcaa

SEQ ID NO: 289561 - DNA, 20 bp, synthetic construct
  source 1..20: mol_type = other DNA
gcctctgcctcctgggttca

SEQ ID NO: 289562 - DNA, 20 bp, synthetic construct
  source 1..20: mol_type = other DNA
agcctctgcctcctgggttc

SEQ ID NO: 289563 - DNA, 20 bp, synthetic construct
  source 1..20: mol_type = other DNA
cagcctctgcctcctgggtt

SEQ ID NO: 289564 - DNA, 20 bp, synthetic construct
  source 1..20: mol_type = other DNA
tcagcctctgcctcctgggt

SEQ ID NO: 289565 - DNA, 20 bp, synthetic construct
  source 1..20: mol_type = other DNA
ctcagcctctgcctcctggg

SEQ ID NO: 289566 - DNA, 20 bp, synthetic construct
  source 1..20: mol_type = other DNA
actcagcctctgcctcctgg

SEQ ID NO: 289567 - DNA, 20 bp, synthetic construct
  source 1..20: mol_type = other DNA
cactcagcctctgcctcctg

SEQ ID NO: 289568 - DNA, 20 bp, synthetic construct
  source 1..20: mol_type = other DNA
tcactcagcctctgcctcct

SEQ ID NO: 289569 - DNA, 20 bp, synthetic construct
  source 1..20: mol_type = other DNA
ctcactcagcctctgcctcc

SEQ ID NO: 289570 - DNA, 20 bp, synthetic construct
  source 1..20: mol_type = other DNA
gctcactcagcctctgcctc

SEQ ID NO: 289571 - DNA, 20 bp, synthetic construct
  source 1..20: mol_type = other DNA
ggctcactcagcctctgcct

SEQ ID NO: 289572 - DNA, 20 bp, synthetic construct
  source 1..20: mol_type = other DNA
tggctcactcagcctctgcc

SEQ ID NO: 289573 - DNA, 20 bp, synthetic construct
  source 1..20: mol_type = other DNA
ttggctcactcagcctctgc

SEQ ID NO: 289574 - DNA, 20 bp, synthetic construct
  source 1..20: mol_type = other DNA
cttggctcactcagcctctg

SEQ ID NO: 289575 - DNA, 20 bp, synthetic construct
  source 1..20: mol_type = other DNA
tcttggctcactcagcctct

SEQ ID NO: 289576 - DNA, 20 bp, synthetic construct
  source 1..20: mol_type = other DNA
atcttggctcactcagcctc

SEQ ID NO: 289577 - DNA, 20 bp, synthetic construct
  source 1..20: mol_type = other DNA
gatcttggctcactcagcct

SEQ ID NO: 289578 - DNA, 20 bp, synthetic construct
  source 1..20: mol_type = other DNA
cgatcttggctcactcagcc

SEQ ID NO: 289579 - DNA, 20 bp, synthetic construct
  source 1..20: mol_type = other DNA
acgatcttggctcactcagc

SEQ ID NO: 289580 - DNA, 20 bp, synthetic construct
  source 1..20: mol_type = other DNA
cacgatcttggctcactcag

SEQ ID NO: 289581 - DNA, 20 bp, synthetic construct
  source 1..20: mol_type = other DNA
gcacgatcttggctcactca

SEQ ID NO: 289582 - DNA, 20 bp, synthetic construct
  source 1..20: mol_type = other DNA
ggcacgatcttggctcactc

SEQ ID NO: 289583 - DNA, 20 bp, synthetic construct
  source 1..20: mol_type = other DNA
tggcacgatcttggctcact

SEQ ID NO: 289584 - DNA, 20 bp, synthetic construct
  source 1..20: mol_type = other DNA
ttggcacgatcttggctcac

SEQ ID NO: 289585 - DNA, 20 bp, synthetic construct
  source 1..20: mol_type = other DNA
attggcacgatcttggctca

SEQ ID NO: 289586 - DNA, 20 bp, synthetic construct
  source 1..20: mol_type = other DNA
cattggcacgatcttggctc

SEQ ID NO: 289587 - DNA, 20 bp, synthetic construct
  source 1..20: mol_type = other DNA
gcattggcacgatcttggct

SEQ ID NO: 289588 - DNA, 20 bp, synthetic construct
  source 1..20: mol_type = other DNA
tgcattggcacgatcttggc

SEQ ID NO: 289589 - DNA, 20 bp, synthetic construct
  source 1..20: mol_type = other DNA
gtgcattggcacgatcttgg

SEQ ID NO: 289590 - DNA, 20 bp, synthetic construct
  source 1..20: mol_type = other DNA
agtgcattggcacgatcttg

SEQ ID NO: 289591 - DNA, 20 bp, synthetic construct
  source 1..20: mol_type = other DNA
gagtgcattggcacgatctt

SEQ ID NO: 289592 - DNA, 20 bp, synthetic construct
  source 1..20: mol_type = other DNA
ggagtgcattggcacgatct

SEQ ID NO: 289593 - DNA, 20 bp, synthetic construct
  source 1..20: mol_type = other DNA
tggagtgcattggcacgatc

SEQ ID NO: 289594 - DNA, 20 bp, synthetic construct
  source 1..20: mol_type = other DNA
ctggagtgcattggcacgat

SEQ ID NO: 289595 - DNA, 20 bp, synthetic construct
  source 1..20: mol_type = other DNA
gctggagtgcattggcacga

SEQ ID NO: 289596 - DNA, 20 bp, synthetic construct
  source 1..20: mol_type = other DNA
agctggagtgcattggcacg

SEQ ID NO: 289597 - DNA, 20 bp, synthetic construct
  source 1..20: mol_type = other DNA
aagctggagtgcattggcac

SEQ ID NO: 289598 - DNA, 20 bp, synthetic construct
  source 1..20: mol_type = other DNA
caagctggagtgcattggca

SEQ ID NO: 289599 - DNA, 20 bp, synthetic construct
  source 1..20: mol_type = other DNA
ccaagctggagtgcattggc

SEQ ID NO: 289600 - DNA, 20 bp, synthetic construct
  source 1..20: mol_type = other DNA
cccaagctggagtgcattgg

SEQ ID NO: 289601 - DNA, 20 bp, synthetic construct
  source 1..20: mol_type = other DNA
acccaagctggagtgcattg

SEQ ID NO: 289602 - DNA, 20 bp, synthetic construct
  source 1..20: mol_type = other DNA
cacccaagctggagtgcatt

SEQ ID NO: 289603 - DNA, 20 bp, synthetic construct
  source 1..20: mol_type = other DNA
tcacccaagctggagtgcat

SEQ ID NO: 289604 - DNA, 20 bp, synthetic construct
  source 1..20: mol_type = other DNA
ctcacccaagctggagtgca

SEQ ID NO: 289605 - DNA, 20 bp, synthetic construct
  source 1..20: mol_type = other DNA
cctcacccaagctggagtgc

SEQ ID NO: 289606 - DNA, 20 bp, synthetic construct
  source 1..20: mol_type = other DNA
ccctcacccaagctggagtg

SEQ ID NO: 289607 - DNA, 20 bp, synthetic construct
  source 1..20: mol_type = other DNA
tccctcacccaagctggagt

SEQ ID NO: 289608 - DNA, 20 bp, synthetic construct
  source 1..20: mol_type = other DNA
ctccctcacccaagctggag

SEQ ID NO: 289609 - DNA, 20 bp, synthetic construct
  source 1..20: mol_type = other DNA
actccctcacccaagctgga

SEQ ID NO: 289610 - DNA, 20 bp, synthetic construct
  source 1..20: mol_type = other DNA
cactccctcacccaagctgg

SEQ ID NO: 289611 - DNA, 20 bp, synthetic construct
  source 1..20: mol_type = other DNA
tcactccctcacccaagctg

SEQ ID NO: 289612 - DNA, 20 bp, synthetic construct
  source 1..20: mol_type = other DNA
ctcactccctcacccaagct

SEQ ID NO: 289613 - DNA, 20 bp, synthetic construct
  source 1..20: mol_type = other DNA
tctcactccctcacccaagc

SEQ ID NO: 289614 - DNA, 20 bp, synthetic construct
  source 1..20: mol_type = other DNA
gtctcactccctcacccaag

SEQ ID NO: 289615 - DNA, 20 bp, synthetic construct
  source 1..20: mol_type = other DNA
agtctcactccctcacccaa

SEQ ID NO: 289616 - DNA, 20 bp, synthetic construct
  source 1..20: mol_type = other DNA
gagtctcactccctcaccca

SEQ ID NO: 289617 - DNA, 20 bp, synthetic construct
  source 1..20: mol_type = other DNA
ggagtctcactccctcaccc

SEQ ID NO: 289618 - DNA, 20 bp, synthetic construct
  source 1..20: mol_type = other DNA
cggagtctcactccctcacc

SEQ ID NO: 289619 - DNA, 20 bp, synthetic construct
  source 1..20: mol_type = other DNA
acggagtctcactccctcac

SEQ ID NO: 289620 - DNA, 20 bp, synthetic construct
  source 1..20: mol_type = other DNA
gacggagtctcactccctca

SEQ ID NO: 289621 - DNA, 20 bp, synthetic construct
  source 1..20: mol_type = other DNA
agacggagtctcactccctc

SEQ ID NO: 289622 - DNA, 20 bp, synthetic construct
  source 1..20: mol_type = other DNA
gagacggagtctcactccct

SEQ ID NO: 289623 - DNA, 20 bp, synthetic construct
  source 1..20: mol_type = other DNA
tgagacggagtctcactccc

SEQ ID NO: 289624 - DNA, 20 bp, synthetic construct
  source 1..20: mol_type = other DNA
ttgagacggagtctcactcc

SEQ ID NO: 289625 - DNA, 20 bp, synthetic construct
  source 1..20: mol_type = other DNA
tttgagacggagtctcactc

SEQ ID NO: 289626 - DNA, 20 bp, synthetic construct
  source 1..20: mol_type = other DNA
ttttgagacggagtctcact

SEQ ID NO: 289627 - DNA, 20 bp, synthetic construct
  source 1..20: mol_type = other DNA
tttttgagacggagtctcac

SEQ ID NO: 289628 - DNA, 20 bp, synthetic construct
  source 1..20: mol_type = other DNA
ttttttgagacggagtctca

SEQ ID NO: 289629 - DNA, 20 bp, synthetic construct
  source 1..20: mol_type = other DNA
tttttttgagacggagtctc

SEQ ID NO: 289630 - DNA, 20 bp, synthetic construct
  source 1..20: mol_type = other DNA
ttttttttgagacggagtct

SEQ ID NO: 289631 - DNA, 20 bp, synthetic construct
  source 1..20: mol_type = other DNA
tttttttttgagacggagtc

SEQ ID NO: 289632 - DNA, 20 bp, synthetic construct
  source 1..20: mol_type = other DNA
ttttttttttgagacggagt

SEQ ID NO: 289633 - DNA, 20 bp, synthetic construct
  source 1..20: mol_type = other DNA
tttttttttttgagacggag

SEQ ID NO: 289634 - DNA, 20 bp, synthetic construct
  source 1..20: mol_type = other DNA
ttttttttttttgagacgga

SEQ ID NO: 289635 - DNA, 20 bp, synthetic construct
  source 1..20: mol_type = other DNA
tttttttttttttgagacgg

SEQ ID NO: 289636 - DNA, 20 bp, synthetic construct
  source 1..20: mol_type = other DNA
ttttttttttttttgagacg

SEQ ID NO: 289637 - DNA, 20 bp, synthetic construct
  source 1..20: mol_type = other DNA
tttttttttttttttgagac

SEQ ID NO: 289638 - DNA, 20 bp, synthetic construct
  source 1..20: mol_type = other DNA
ctttttttttttttttgaga

SEQ ID NO: 289639 - DNA, 20 bp, synthetic construct
  source 1..20: mol_type = other DNA
tctttttttttttttttgag

SEQ ID NO: 289640 - DNA, 20 bp, synthetic construct
  source 1..20: mol_type = other DNA
ttctttttttttttttttga

SEQ ID NO: 289641 - DNA, 20 bp, synthetic construct
  source 1..20: mol_type = other DNA
tttctttttttttttttttg

SEQ ID NO: 289642 - DNA, 20 bp, synthetic construct
  source 1..20: mol_type = other DNA
ctttcttttttttttttttt

SEQ ID NO: 289643 - DNA, 20 bp, synthetic construct
  source 1..20: mol_type = other DNA
tctttctttttttttttttt

SEQ ID NO: 289644 - DNA, 20 bp, synthetic construct
  source 1..20: mol_type = other DNA
ttctttcttttttttttttt

SEQ ID NO: 289645 - DNA, 20 bp, synthetic construct
  source 1..20: mol_type = other DNA
tttctttctttttttttttt

SEQ ID NO: 289646 - DNA, 20 bp, synthetic construct
  source 1..20: mol_type = other DNA
ttttctttcttttttttttt

SEQ ID NO: 289647 - DNA, 20 bp, synthetic construct
  source 1..20: mol_type = other DNA
tttttctttctttttttttt

SEQ ID NO: 289648 - DNA, 20 bp, synthetic construct
  source 1..20: mol_type = other DNA
ctttttctttcttttttttt

SEQ ID NO: 289649 - DNA, 20 bp, synthetic construct
  source 1..20: mol_type = other DNA
tctttttctttctttttttt

SEQ ID NO: 289650 - DNA, 20 bp, synthetic construct
  source 1..20: mol_type = other DNA
ttctttttctttcttttttt

SEQ ID NO: 289651 - DNA, 20 bp, synthetic construct
  source 1..20: mol_type = other DNA
tttctttttctttctttttt

SEQ ID NO: 289652 - DNA, 20 bp, synthetic construct
  source 1..20: mol_type = other DNA
ttttctttttctttcttttt

SEQ ID NO: 289653 - DNA, 20 bp, synthetic construct
  source 1..20: mol_type = other DNA
cttttctttttctttctttt

SEQ ID NO: 289654 - DNA, 20 bp, synthetic construct
  source 1..20: mol_type = other DNA
tcttttctttttctttcttt

SEQ ID NO: 289655 - DNA, 20 bp, synthetic construct
  source 1..20: mol_type = other DNA
ttcttttctttttctttctt

SEQ ID NO: 289656 - DNA, 20 bp, synthetic construct
  source 1..20: mol_type = other DNA
tttcttttctttttctttct

SEQ ID NO: 289657 - DNA, 20 bp, synthetic construct
  source 1..20: mol_type = other DNA
ctttcttttctttttctttc

SEQ ID NO: 289658 - DNA, 20 bp, synthetic construct
  source 1..20: mol_type = other DNA
actttcttttctttttcttt

SEQ ID NO: 289659 - DNA, 20 bp, synthetic construct
  source 1..20: mol_type = other DNA
cactttcttttctttttctt

SEQ ID NO: 289660 - DNA, 20 bp, synthetic construct
  source 1..20: mol_type = other DNA
tcactttcttttctttttct

SEQ ID NO: 289661 - DNA, 20 bp, synthetic construct
  source 1..20: mol_type = other DNA
atcactttcttttctttttc

SEQ ID NO: 289662 - DNA, 20 bp, synthetic construct
  source 1..20: mol_type = other DNA
gatcactttcttttcttttt

SEQ ID NO: 289663 - DNA, 20 bp, synthetic construct
  source 1..20: mol_type = other DNA
ggatcactttcttttctttt

SEQ ID NO: 289664 - DNA, 20 bp, synthetic construct
  source 1..20: mol_type = other DNA
aggatcactttcttttcttt

SEQ ID NO: 289665 - DNA, 20 bp, synthetic construct
  source 1..20: mol_type = other DNA
taggatcactttcttttctt

SEQ ID NO: 289666 - DNA, 20 bp, synthetic construct
  source 1..20: mol_type = other DNA
gtaggatcactttcttttct

SEQ ID NO: 289667 - DNA, 20 bp, synthetic construct
  source 1..20: mol_type = other DNA
agtaggatcactttcttttc

SEQ ID NO: 289668 - DNA, 20 bp, synthetic construct
  source 1..20: mol_type = other DNA
cagtaggatcactttctttt

SEQ ID NO: 289669 - DNA, 20 bp, synthetic construct
  source 1..20: mol_type = other DNA
ccagtaggatcactttcttt

SEQ ID NO: 289670 - DNA, 20 bp, synthetic construct
  source 1..20: mol_type = other DNA
tccagtaggatcactttctt

SEQ ID NO: 289671 - DNA, 20 bp, synthetic construct
  source 1..20: mol_type = other DNA
ttccagtaggatcactttct

SEQ ID NO: 289672 - DNA, 20 bp, synthetic construct
  source 1..20: mol_type = other DNA
gttccagtaggatcactttc

SEQ ID NO: 289673 - DNA, 20 bp, synthetic construct
  source 1..20: mol_type = other DNA
ggttccagtaggatcacttt

SEQ ID NO: 289674 - DNA, 20 bp, synthetic construct
  source 1..20: mol_type = other DNA
tggttccagtaggatcactt

SEQ ID NO: 289675 - DNA, 20 bp, synthetic construct
  source 1..20: mol_type = other DNA
atggttccagtaggatcact

SEQ ID NO: 289676 - DNA, 20 bp, synthetic construct
  source 1..20: mol_type = other DNA
catggttccagtaggatcac

SEQ ID NO: 289677 - DNA, 20 bp, synthetic construct
  source 1..20: mol_type = other DNA
gcatggttccagtaggatca

SEQ ID NO: 289678 - DNA, 20 bp, synthetic construct
  source 1..20: mol_type = other DNA
agcatggttccagtaggatc

SEQ ID NO: 289679 - DNA, 20 bp, synthetic construct
  source 1..20: mol_type = other DNA
aagcatggttccagtaggat

SEQ ID NO: 289680 - DNA, 20 bp, synthetic construct
  source 1..20: mol_type = other DNA
taagcatggttccagtagga

SEQ ID NO: 289681 - DNA, 20 bp, synthetic construct
  source 1..20: mol_type = other DNA
gtaagcatggttccagtagg

SEQ ID NO: 289682 - DNA, 20 bp, synthetic construct
  source 1..20: mol_type = other DNA
agtaagcatggttccagtag

SEQ ID NO: 289683 - DNA, 20 bp, synthetic construct
  source 1..20: mol_type = other DNA
gagtaagcatggttccagta

SEQ ID NO: 289684 - DNA, 20 bp, synthetic construct
  source 1..20: mol_type = other DNA
ggagtaagcatggttccagt

SEQ ID NO: 289685 - DNA, 20 bp, synthetic construct
  source 1..20: mol_type = other DNA
gggagtaagcatggttccag

SEQ ID NO: 289686 - DNA, 20 bp, synthetic construct
  source 1..20: mol_type = other DNA
ggggagtaagcatggttcca

SEQ ID NO: 289687 - DNA, 20 bp, synthetic construct
  source 1..20: mol_type = other DNA
aggggagtaagcatggttcc

SEQ ID NO: 289688 - DNA, 20 bp, synthetic construct
  source 1..20: mol_type = other DNA
gaggggagtaagcatggttc

SEQ ID NO: 289689 - DNA, 20 bp, synthetic construct
  source 1..20: mol_type = other DNA
ggaggggagtaagcatggtt

SEQ ID NO: 289690 - DNA, 20 bp, synthetic construct
  source 1..20: mol_type = other DNA
gggaggggagtaagcatggt

SEQ ID NO: 289691 - DNA, 20 bp, synthetic construct
  source 1..20: mol_type = other DNA
ggggaggggagtaagcatgg

SEQ ID NO: 289692 - DNA, 20 bp, synthetic construct
  source 1..20: mol_type = other DNA
tggggaggggagtaagcatg

SEQ ID NO: 289693 - DNA, 20 bp, synthetic construct
  source 1..20: mol_type = other DNA
gtggggaggggagtaagcat

SEQ ID NO: 289694 - DNA, 20 bp, synthetic construct
  source 1..20: mol_type = other DNA
ggtggggaggggagtaagca

SEQ ID NO: 289695 - DNA, 20 bp, synthetic construct
  source 1..20: mol_type = other DNA
aggtggggaggggagtaagc

SEQ ID NO: 289696 - DNA, 20 bp, synthetic construct
  source 1..20: mol_type = other DNA
gaggtggggaggggagtaag

SEQ ID NO: 289697 - DNA, 20 bp, synthetic construct
  source 1..20: mol_type = other DNA
tgaggtggggaggggagtaa

SEQ ID NO: 289698 - DNA, 20 bp, synthetic construct
  source 1..20: mol_type = other DNA
gtgaggtggggaggggagta

SEQ ID NO: 289699 - DNA, 20 bp, synthetic construct
  source 1..20: mol_type = other DNA
tgtgaggtggggaggggagt

SEQ ID NO: 289700 - DNA, 20 bp, synthetic construct
  source 1..20: mol_type = other DNA
gtgtgaggtggggaggggag

SEQ ID NO: 289701 - DNA, 20 bp, synthetic construct
  source 1..20: mol_type = other DNA
agtgtgaggtggggagggga

SEQ ID NO: 289702 - DNA, 20 bp, synthetic construct
  source 1..20: mol_type = other DNA
cagtgtgaggtggggagggg

SEQ ID NO: 289703 - DNA, 20 bp, synthetic construct
  source 1..20: mol_type = other DNA
acagtgtgaggtggggaggg

SEQ ID NO: 289704 - DNA, 20 bp, synthetic construct
  source 1..20: mol_type = other DNA
cacagtgtgaggtggggagg

SEQ ID NO: 289705 - DNA, 20 bp, synthetic construct
  source 1..20: mol_type = other DNA
acacagtgtgaggtggggag

SEQ ID NO: 289706 - DNA, 20 bp, synthetic construct
  source 1..20: mol_type = other DNA
tacacagtgtgaggtgggga

SEQ ID NO: 289707 - DNA, 20 bp, synthetic construct
  source 1..20: mol_type = other DNA
ctacacagtgtgaggtgggg

SEQ ID NO: 289708 - DNA, 20 bp, synthetic construct
  source 1..20: mol_type = other DNA
tctacacagtgtgaggtggg

SEQ ID NO: 289709 - DNA, 20 bp, synthetic construct
  source 1..20: mol_type = other DNA
ttctacacagtgtgaggtgg

SEQ ID NO: 289710 - DNA, 20 bp, synthetic construct
  source 1..20: mol_type = other DNA
tttctacacagtgtgaggtg

SEQ ID NO: 289711 - DNA, 20 bp, synthetic construct
  source 1..20: mol_type = other DNA
atttctacacagtgtgaggt

SEQ ID NO: 289712 - DNA, 20 bp, synthetic construct
  source 1..20: mol_type = other DNA
aatttctacacagtgtgagg

SEQ ID NO: 289713 - DNA, 20 bp, synthetic construct
  source 1..20: mol_type = other DNA
taatttctacacagtgtgag

SEQ ID NO: 289714 - DNA, 20 bp, synthetic construct
  source 1..20: mol_type = other DNA
ctaatttctacacagtgtga

SEQ ID NO: 289715 - DNA, 20 bp, synthetic construct
  source 1..20: mol_type = other DNA
actaatttctacacagtgtg

SEQ ID NO: 289716 - DNA, 20 bp, synthetic construct
  source 1..20: mol_type = other DNA
cactaatttctacacagtgt

SEQ ID NO: 289717 - DNA, 20 bp, synthetic construct
  source 1..20: mol_type = other DNA
gcactaatttctacacagtg

SEQ ID NO: 289718 - DNA, 20 bp, synthetic construct
  source 1..20: mol_type = other DNA
agcactaatttctacacagt

SEQ ID NO: 289719 - DNA, 20 bp, synthetic construct
  source 1..20: mol_type = other DNA
cagcactaatttctacacag

SEQ ID NO: 289720 - DNA, 20 bp, synthetic construct
  source 1..20: mol_type = other DNA
acagcactaatttctacaca

SEQ ID NO: 289721 - DNA, 20 bp, synthetic construct
  source 1..20: mol_type = other DNA
gacagcactaatttctacac

SEQ ID NO: 289722 - DNA, 20 bp, synthetic construct
  source 1..20: mol_type = other DNA
cgacagcactaatttctaca

SEQ ID NO: 289723 - DNA, 20 bp, synthetic construct
  source 1..20: mol_type = other DNA
ccgacagcactaatttctac

SEQ ID NO: 289724 - DNA, 20 bp, synthetic construct
  source 1..20: mol_type = other DNA
gccgacagcactaatttcta

SEQ ID NO: 289725 - DNA, 20 bp, synthetic construct
  source 1..20: mol_type = other DNA
ggccgacagcactaatttct

SEQ ID NO: 289726 - DNA, 20 bp, synthetic construct
  source 1..20: mol_type = other DNA
tggccgacagcactaatttc

SEQ ID NO: 289727 - DNA, 20 bp, synthetic construct
  source 1..20: mol_type = other DNA
ctggccgacagcactaattt

SEQ ID NO: 289728 - DNA, 20 bp, synthetic construct
  source 1..20: mol_type = other DNA
cctggccgacagcactaatt

SEQ ID NO: 289729 - DNA, 20 bp, synthetic construct
  source 1..20: mol_type = other DNA
gcctggccgacagcactaat

SEQ ID NO: 289730 - DNA, 20 bp, synthetic construct
  source 1..20: mol_type = other DNA
cgcctggccgacagcactaa

SEQ ID NO: 289731 - DNA, 20 bp, synthetic construct
  source 1..20: mol_type = other DNA
gcgcctggccgacagcacta

SEQ ID NO: 289732 - DNA, 20 bp, synthetic construct
  source 1..20: mol_type = other DNA
cgcgcctggccgacagcact

SEQ ID NO: 289733 - DNA, 20 bp, synthetic construct
  source 1..20: mol_type = other DNA
ccgcgcctggccgacagcac

SEQ ID NO: 289734 - DNA, 20 bp, synthetic construct
  source 1..20: mol_type = other DNA
accgcgcctggccgacagca

SEQ ID NO: 289735 - DNA, 20 bp, synthetic construct
  source 1..20: mol_type = other DNA
caccgcgcctggccgacagc

SEQ ID NO: 289736 - DNA, 20 bp, synthetic construct
  source 1..20: mol_type = other DNA
ccaccgcgcctggccgacag

SEQ ID NO: 289737 - DNA, 20 bp, synthetic construct
  source 1..20: mol_type = other DNA
gccaccgcgcctggccgaca

SEQ ID NO: 289738 - DNA, 20 bp, synthetic construct
  source 1..20: mol_type = other DNA
agccaccgcgcctggccgac

SEQ ID NO: 289739 - DNA, 20 bp, synthetic construct
  source 1..20: mol_type = other DNA
gagccaccgcgcctggccga

SEQ ID NO: 289740 - DNA, 20 bp, synthetic construct
  source 1..20: mol_type = other DNA
tgagccaccgcgcctggccg

SEQ ID NO: 289741 - DNA, 20 bp, synthetic construct
  source 1..20: mol_type = other DNA
atgagccaccgcgcctggcc

SEQ ID NO: 289742 - DNA, 20 bp, synthetic construct
  source 1..20: mol_type = other DNA
catgagccaccgcgcctggc

SEQ ID NO: 289743 - DNA, 20 bp, synthetic construct
  source 1..20: mol_type = other DNA
gcatgagccaccgcgcctgg

SEQ ID NO: 289744 - DNA, 20 bp, synthetic construct
  source 1..20: mol_type = other DNA
ggcatgagccaccgcgcctg

SEQ ID NO: 289745 - DNA, 20 bp, synthetic construct
  source 1..20: mol_type = other DNA
aggcatgagccaccgcgcct

SEQ ID NO: 289746 - DNA, 20 bp, synthetic construct
  source 1..20: mol_type = other DNA
caggcatgagccaccgcgcc

SEQ ID NO: 289747 - DNA, 20 bp, synthetic construct
  source 1..20: mol_type = other DNA
acaggcatgagccaccgcgc

SEQ ID NO: 289748 - DNA, 20 bp, synthetic construct
  source 1..20: mol_type = other DNA
tacaggcatgagccaccgcg

SEQ ID NO: 289749 - DNA, 20 bp, synthetic construct
  source 1..20: mol_type = other DNA
ttacaggcatgagccaccgc

SEQ ID NO: 289750 - DNA, 20 bp, synthetic construct
  source 1..20: mol_type = other DNA
attacaggcatgagccaccg

SEQ ID NO: 289751 - DNA, 20 bp, synthetic construct
  source 1..20: mol_type = other DNA
gattacaggcatgagccacc

SEQ ID NO: 289752 - DNA, 20 bp, synthetic construct
  source 1..20: mol_type = other DNA
cgattacaggcatgagccac

SEQ ID NO: 289753 - DNA, 20 bp, synthetic construct
  source 1..20: mol_type = other DNA
gcgattacaggcatgagcca

SEQ ID NO: 289754 - DNA, 20 bp, synthetic construct
  source 1..20: mol_type = other DNA
tgcgattacaggcatgagcc

SEQ ID NO: 289755 - DNA, 20 bp, synthetic construct
  source 1..20: mol_type = other DNA
ctgcgattacaggcatgagc

SEQ ID NO: 289756 - DNA, 20 bp, synthetic construct
  source 1..20: mol_type = other DNA
gctgcgattacaggcatgag

SEQ ID NO: 289757 - DNA, 20 bp, synthetic construct
  source 1..20: mol_type = other DNA
tgctgcgattacaggcatga

SEQ ID NO: 289758 - DNA, 20 bp, synthetic construct
  source 1..20: mol_type = other DNA
gtgctgcgattacaggcatg

SEQ ID NO: 289759 - DNA, 20 bp, synthetic construct
  source 1..20: mol_type = other DNA
agtgctgcgattacaggcat

SEQ ID NO: 289760 - DNA, 20 bp, synthetic construct
  source 1..20: mol_type = other DNA
aagtgctgcgattacaggca

SEQ ID NO: 289761 - DNA, 20 bp, synthetic construct
  source 1..20: mol_type = other DNA
aaagtgctgcgattacaggc

SEQ ID NO: 289762 - DNA, 20 bp, synthetic construct
  source 1..20: mol_type = other DNA
caaagtgctgcgattacagg

SEQ ID NO: 289763 - DNA, 20 bp, synthetic construct
  source 1..20: mol_type = other DNA
ccaaagtgctgcgattacag

SEQ ID NO: 289764 - DNA, 20 bp, synthetic construct
  source 1..20: mol_type = other DNA
cccaaagtgctgcgattaca

SEQ ID NO: 289765 - DNA, 20 bp, synthetic construct
  source 1..20: mol_type = other DNA
tcccaaagtgctgcgattac

SEQ ID NO: 289766 - DNA, 20 bp, synthetic construct
  source 1..20: mol_type = other DNA
ctcccaaagtgctgcgatta

SEQ ID NO: 289767 - DNA, 20 bp, synthetic construct
  source 1..20: mol_type = other DNA
cctcccaaagtgctgcgatt

SEQ ID NO: 289768 - DNA, 20 bp, synthetic construct
  source 1..20: mol_type = other DNA
gcctcccaaagtgctgcgat

SEQ ID NO: 289769 - DNA, 20 bp, synthetic construct
  source 1..20: mol_type = other DNA
ggcctcccaaagtgctgcga

SEQ ID NO: 289770 - DNA, 20 bp, synthetic construct
  source 1..20: mol_type = other DNA
tggcctcccaaagtgctgcg

SEQ ID NO: 289771 - DNA, 20 bp, synthetic construct
  source 1..20: mol_type = other DNA
ttggcctcccaaagtgctgc

SEQ ID NO: 289772 - DNA, 20 bp, synthetic construct
  source 1..20: mol_type = other DNA
cttggcctcccaaagtgctg

SEQ ID NO: 289773 - DNA, 20 bp, synthetic construct
  source 1..20: mol_type = other DNA
ccttggcctcccaaagtgct

SEQ ID NO: 289774 - DNA, 20 bp, synthetic construct
  source 1..20: mol_type = other DNA
gccttggcctcccaaagtgc

SEQ ID NO: 289775 - DNA, 20 bp, synthetic construct
  source 1..20: mol_type = other DNA
tgccttggcctcccaaagtg

SEQ ID NO: 289776 - DNA, 20 bp, synthetic construct
  source 1..20: mol_type = other DNA
ctgccttggcctcccaaagt

SEQ ID NO: 289777 - DNA, 20 bp, synthetic construct
  source 1..20: mol_type = other DNA
cctgccttggcctcccaaag

SEQ ID NO: 289778 - DNA, 20 bp, synthetic construct
  source 1..20: mol_type = other DNA
gcctgccttggcctcccaaa

SEQ ID NO: 289779 - DNA, 20 bp, synthetic construct
  source 1..20: mol_type = other DNA
cgcctgccttggcctcccaa

SEQ ID NO: 289780 - DNA, 20 bp, synthetic construct
  source 1..20: mol_type = other DNA
ccgcctgccttggcctccca

SEQ ID NO: 289781 - DNA, 20 bp, synthetic construct
  source 1..20: mol_type = other DNA
tccgcctgccttggcctccc

SEQ ID NO: 289782 - DNA, 20 bp, synthetic construct
  source 1..20: mol_type = other DNA
atccgcctgccttggcctcc

SEQ ID NO: 289783 - DNA, 20 bp, synthetic construct
  source 1..20: mol_type = other DNA
gatccgcctgccttggcctc

SEQ ID NO: 289784 - DNA, 20 bp, synthetic construct
  source 1..20: mol_type = other DNA
tgatccgcctgccttggcct

SEQ ID NO: 289785 - DNA, 20 bp, synthetic construct
  source 1..20: mol_type = other DNA
gtgatccgcctgccttggcc

SEQ ID NO: 289786 - DNA, 20 bp, synthetic construct
  source 1..20: mol_type = other DNA
cgtgatccgcctgccttggc

SEQ ID NO: 289787 - DNA, 20 bp, synthetic construct
  source 1..20: mol_type = other DNA
tcgtgatccgcctgccttgg

SEQ ID NO: 289788 - DNA, 20 bp, synthetic construct
  source 1..20: mol_type = other DNA
ctcgtgatccgcctgccttg

SEQ ID NO: 289789 - DNA, 20 bp, synthetic construct
  source 1..20: mol_type = other DNA
cctcgtgatccgcctgcctt

SEQ ID NO: 289790 - DNA, 20 bp, synthetic construct
  source 1..20: mol_type = other DNA
acctcgtgatccgcctgcct

SEQ ID NO: 289791 - DNA, 20 bp, synthetic construct
  source 1..20: mol_type = other DNA
gacctcgtgatccgcctgcc

SEQ ID NO: 289792 - DNA, 20 bp, synthetic construct
  source 1..20: mol_type = other DNA
tgacctcgtgatccgcctgc

SEQ ID NO: 289793 - DNA, 20 bp, synthetic construct
  source 1..20: mol_type = other DNA
ctgacctcgtgatccgcctg

SEQ ID NO: 289794 - DNA, 20 bp, synthetic construct
  source 1..20: mol_type = other DNA
cctgacctcgtgatccgcct

SEQ ID NO: 289795 - DNA, 20 bp, synthetic construct
  source 1..20: mol_type = other DNA
tcctgacctcgtgatccgcc

SEQ ID NO: 289796 - DNA, 20 bp, synthetic construct
  source 1..20: mol_type = other DNA
ctcctgacctcgtgatccgc

SEQ ID NO: 289797 - DNA, 20 bp, synthetic construct
  source 1..20: mol_type = other DNA
tctcctgacctcgtgatccg

SEQ ID NO: 289798 - DNA, 20 bp, synthetic construct
  source 1..20: mol_type = other DNA
atctcctgacctcgtgatcc

SEQ ID NO: 289799 - DNA, 20 bp, synthetic construct
  source 1..20: mol_type = other DNA
gatctcctgacctcgtgatc

SEQ ID NO: 289800 - DNA, 20 bp, synthetic construct
  source 1..20: mol_type = other DNA
tgatctcctgacctcgtgat

SEQ ID NO: 289801 - DNA, 20 bp, synthetic construct
  source 1..20: mol_type = other DNA
ttgatctcctgacctcgtga

SEQ ID NO: 289802 - DNA, 20 bp, synthetic construct
  source 1..20: mol_type = other DNA
cttgatctcctgacctcgtg

SEQ ID NO: 289803 - DNA, 20 bp, synthetic construct
  source 1..20: mol_type = other DNA
tcttgatctcctgacctcgt

SEQ ID NO: 289804 - DNA, 20 bp, synthetic construct
  source 1..20: mol_type = other DNA
gtcttgatctcctgacctcg

SEQ ID NO: 289805 - DNA, 20 bp, synthetic construct
  source 1..20: mol_type = other DNA
ggtcttgatctcctgacctc

SEQ ID NO: 289806 - DNA, 20 bp, synthetic construct
  source 1..20: mol_type = other DNA
tggtcttgatctcctgacct

SEQ ID NO: 289807 - DNA, 20 bp, synthetic construct
  source 1..20: mol_type = other DNA
atggtcttgatctcctgacc

SEQ ID NO: 289808 - DNA, 20 bp, synthetic construct
  source 1..20: mol_type = other DNA
gatggtcttgatctcctgac

SEQ ID NO: 289809 - DNA, 20 bp, synthetic construct
  source 1..20: mol_type = other DNA
ggatggtcttgatctcctga

SEQ ID NO: 289810 - DNA, 20 bp, synthetic construct
  source 1..20: mol_type = other DNA
aggatggtcttgatctcctg

SEQ ID NO: 289811 - DNA, 20 bp, synthetic construct
  source 1..20: mol_type = other DNA
caggatggtcttgatctcct

SEQ ID NO: 289812 - DNA, 20 bp, synthetic construct
  source 1..20: mol_type = other DNA
ccaggatggtcttgatctcc

SEQ ID NO: 289813 - DNA, 20 bp, synthetic construct
  source 1..20: mol_type = other DNA
gccaggatggtcttgatctc

SEQ ID NO: 289814 - DNA, 20 bp, synthetic construct
  source 1..20: mol_type = other DNA
agccaggatggtcttgatct

SEQ ID NO: 289815 - DNA, 20 bp, synthetic construct
  source 1..20: mol_type = other DNA
tagccaggatggtcttgatc

SEQ ID NO: 289816 - DNA, 20 bp, synthetic construct
  source 1..20: mol_type = other DNA
ttagccaggatggtcttgat

SEQ ID NO: 289817 - DNA, 20 bp, synthetic construct
  source 1..20: mol_type = other DNA
gttagccaggatggtcttga

SEQ ID NO: 289818 - DNA, 20 bp, synthetic construct
  source 1..20: mol_type = other DNA
tgttagccaggatggtcttg

SEQ ID NO: 289819 - DNA, 20 bp, synthetic construct
  source 1..20: mol_type = other DNA
gtgttagccaggatggtctt

SEQ ID NO: 289820 - DNA, 20 bp, synthetic construct
  source 1..20: mol_type = other DNA
tgtgttagccaggatggtct

SEQ ID NO: 289821 - DNA, 20 bp, synthetic construct
  source 1..20: mol_type = other DNA
ctgtgttagccaggatggtc

SEQ ID NO: 289822 - DNA, 20 bp, synthetic construct
  source 1..20: mol_type = other DNA
actgtgttagccaggatggt

SEQ ID NO: 289823 - DNA, 20 bp, synthetic construct
  source 1..20: mol_type = other DNA
cactgtgttagccaggatgg

SEQ ID NO: 289824 - DNA, 20 bp, synthetic construct
  source 1..20: mol_type = other DNA
tcactgtgttagccaggatg

SEQ ID NO: 289825 - DNA, 20 bp, synthetic construct
  source 1..20: mol_type = other DNA
ttcactgtgttagccaggat

SEQ ID NO: 289826 - DNA, 20 bp, synthetic construct
  source 1..20: mol_type = other DNA
tttcactgtgttagccagga

SEQ ID NO: 289827 - DNA, 20 bp, synthetic construct
  source 1..20: mol_type = other DNA
gtttcactgtgttagccagg

SEQ ID NO: 289828 - DNA, 20 bp, synthetic construct
  source 1..20: mol_type = other DNA
ggtttcactgtgttagccag

SEQ ID NO: 289829 - DNA, 20 bp, synthetic construct
  source 1..20: mol_type = other DNA
gggtttcactgtgttagcca

SEQ ID NO: 289830 - DNA, 20 bp, synthetic construct
  source 1..20: mol_type = other DNA
agggtttcactgtgttagcc

SEQ ID NO: 289831 - DNA, 20 bp, synthetic construct
  source 1..20: mol_type = other DNA
cagggtttcactgtgttagc

SEQ ID NO: 289832 - DNA, 20 bp, synthetic construct
  source 1..20: mol_type = other DNA
acagggtttcactgtgttag

SEQ ID NO: 289833 - DNA, 20 bp, synthetic construct
  source 1..20: mol_type = other DNA
gacagggtttcactgtgtta

SEQ ID NO: 289834 - DNA, 20 bp, synthetic construct
  source 1..20: mol_type = other DNA
agacagggtttcactgtgtt

SEQ ID NO: 289835 - DNA, 20 bp, synthetic construct
  source 1..20: mol_type = other DNA
gagacagggtttcactgtgt

SEQ ID NO: 289836 - DNA, 20 bp, synthetic construct
  source 1..20: mol_type = other DNA
agagacagggtttcactgtg

SEQ ID NO: 289837 - DNA, 20 bp, synthetic construct
  source 1..20: mol_type = other DNA
tagagacagggtttcactgt

SEQ ID NO: 289838 - DNA, 20 bp, synthetic construct
  source 1..20: mol_type = other DNA
gtagagacagggtttcactg

SEQ ID NO: 289839 - DNA, 20 bp, synthetic construct
  source 1..20: mol_type = other DNA
agtagagacagggtttcact

SEQ ID NO: 289840 - DNA, 20 bp, synthetic construct
  source 1..20: mol_type = other DNA
tagtagagacagggtttcac

SEQ ID NO: 289841 - DNA, 20 bp, synthetic construct
  source 1..20: mol_type = other DNA
ttagtagagacagggtttca

SEQ ID NO: 289842 - DNA, 20 bp, synthetic construct
  source 1..20: mol_type = other DNA
tttagtagagacagggtttc

SEQ ID NO: 289843 - DNA, 20 bp, synthetic construct
  source 1..20: mol_type = other DNA
ttttagtagagacagggttt

SEQ ID NO: 289844 - DNA, 20 bp, synthetic construct
  source 1..20: mol_type = other DNA
tttttagtagagacagggtt

SEQ ID NO: 289845 - DNA, 20 bp, synthetic construct
  source 1..20: mol_type = other DNA
atttttagtagagacagggt

SEQ ID NO: 289846 - DNA, 20 bp, synthetic construct
  source 1..20: mol_type = other DNA
tatttttagtagagacaggg

SEQ ID NO: 289847 - DNA, 20 bp, synthetic construct
  source 1..20: mol_type = other DNA
gtatttttagtagagacagg

SEQ ID NO: 289848 - DNA, 20 bp, synthetic construct
  source 1..20: mol_type = other DNA
tgtatttttagtagagacag

SEQ ID NO: 289849 - DNA, 20 bp, synthetic construct
  source 1..20: mol_type = other DNA
ttgtatttttagtagagaca

SEQ ID NO: 289850 - DNA, 20 bp, synthetic construct
  source 1..20: mol_type = other DNA
tttgtatttttagtagagac

SEQ ID NO: 289851 - DNA, 20 bp, synthetic construct
  source 1..20: mol_type = other DNA
ttttgtatttttagtagaga

SEQ ID NO: 289852 - DNA, 20 bp, synthetic construct
  source 1..20: mol_type = other DNA
tttttgtatttttagtagag

SEQ ID NO: 289853 - DNA, 20 bp, synthetic construct
  source 1..20: mol_type = other DNA
ttttttgtatttttagtaga

SEQ ID NO: 289854 - DNA, 20 bp, synthetic construct
  source 1..20: mol_type = other DNA
attttttgtatttttagtag

SEQ ID NO: 289855 - DNA, 20 bp, synthetic construct
  source 1..20: mol_type = other DNA
aattttttgtatttttagta

SEQ ID NO: 289856 - DNA, 20 bp, synthetic construct
  source 1..20: mol_type = other DNA
taattttttgtatttttagt

SEQ ID NO: 289857 - DNA, 20 bp, synthetic construct
  source 1..20: mol_type = other DNA
ctaattttttgtatttttag

SEQ ID NO: 289858 - DNA, 20 bp, synthetic construct
  source 1..20: mol_type = other DNA
gctaattttttgtattttta

SEQ ID NO: 289859 - DNA, 20 bp, synthetic construct
  source 1..20: mol_type = other DNA
ggctaattttttgtattttt

SEQ ID NO: 289860 - DNA, 20 bp, synthetic construct
  source 1..20: mol_type = other DNA
cggctaattttttgtatttt

SEQ ID NO: 289861 - DNA, 20 bp, synthetic construct
  source 1..20: mol_type = other DNA
ccggctaattttttgtattt

SEQ ID NO: 289862 - DNA, 20 bp, synthetic construct
  source 1..20: mol_type = other DNA
cccggctaattttttgtatt

SEQ ID NO: 289863 - DNA, 20 bp, synthetic construct
  source 1..20: mol_type = other DNA
gcccggctaattttttgtat

SEQ ID NO: 289864 - DNA, 20 bp, synthetic construct
  source 1..20: mol_type = other DNA
tgcccggctaattttttgta

SEQ ID NO: 289865 - DNA, 20 bp, synthetic construct
  source 1..20: mol_type = other DNA
atgcccggctaattttttgt

SEQ ID NO: 289866 - DNA, 20 bp, synthetic construct
  source 1..20: mol_type = other DNA
catgcccggctaattttttg

SEQ ID NO: 289867 - DNA, 20 bp, synthetic construct
  source 1..20: mol_type = other DNA
ccatgcccggctaatttttt

SEQ ID NO: 289868 - DNA, 20 bp, synthetic construct
  source 1..20: mol_type = other DNA
accatgcccggctaattttt

SEQ ID NO: 289869 - DNA, 20 bp, synthetic construct
  source 1..20: mol_type = other DNA
caccatgcccggctaatttt

SEQ ID NO: 289870 - DNA, 20 bp, synthetic construct
  source 1..20: mol_type = other DNA
ccaccatgcccggctaattt

SEQ ID NO: 289871 - DNA, 20 bp, synthetic construct
  source 1..20: mol_type = other DNA
gccaccatgcccggctaatt

SEQ ID NO: 289872 - DNA, 20 bp, synthetic construct
  source 1..20: mol_type = other DNA
tgccaccatgcccggctaat

SEQ ID NO: 289873 - DNA, 20 bp, synthetic construct
  source 1..20: mol_type = other DNA
ctgccaccatgcccggctaa

SEQ ID NO: 289874 - DNA, 20 bp, synthetic construct
  source 1..20: mol_type = other DNA
cctgccaccatgcccggcta

SEQ ID NO: 289875 - DNA, 20 bp, synthetic construct
  source 1..20: mol_type = other DNA
gcctgccaccatgcccggct

SEQ ID NO: 289876 - DNA, 20 bp, synthetic construct
  source 1..20: mol_type = other DNA
tgcctgccaccatgcccggc

SEQ ID NO: 289877 - DNA, 20 bp, synthetic construct
  source 1..20: mol_type = other DNA
gtgcctgccaccatgcccgg

SEQ ID NO: 289878 - DNA, 20 bp, synthetic construct
  source 1..20: mol_type = other DNA
ggtgcctgccaccatgcccg

SEQ ID NO: 289879 - DNA, 20 bp, synthetic construct
  source 1..20: mol_type = other DNA
aggtgcctgccaccatgccc

SEQ ID NO: 289880 - DNA, 20 bp, synthetic construct
  source 1..20: mol_type = other DNA
caggtgcctgccaccatgcc

SEQ ID NO: 289881 - DNA, 20 bp, synthetic construct
  source 1..20: mol_type = other DNA
acaggtgcctgccaccatgc

SEQ ID NO: 289882 - DNA, 20 bp, synthetic construct
  source 1..20: mol_type = other DNA
tacaggtgcctgccaccatg

SEQ ID NO: 289883 - DNA, 20 bp, synthetic construct
  source 1..20: mol_type = other DNA
ctacaggtgcctgccaccat

SEQ ID NO: 289884 - DNA, 20 bp, synthetic construct
  source 1..20: mol_type = other DNA
actacaggtgcctgccacca

SEQ ID NO: 289885 - DNA, 20 bp, synthetic construct
  source 1..20: mol_type = other DNA
gactacaggtgcctgccacc

SEQ ID NO: 289886 - DNA, 20 bp, synthetic construct
  source 1..20: mol_type = other DNA
ggactacaggtgcctgccac

SEQ ID NO: 289887 - DNA, 20 bp, synthetic construct
  source 1..20: mol_type = other DNA
gggactacaggtgcctgcca

SEQ ID NO: 289888 - DNA, 20 bp, synthetic construct
  source 1..20: mol_type = other DNA
tgggactacaggtgcctgcc

SEQ ID NO: 289889 - DNA, 20 bp, synthetic construct
  source 1..20: mol_type = other DNA
ttgggactacaggtgcctgc

SEQ ID NO: 289890 - DNA, 20 bp, synthetic construct
  source 1..20: mol_type = other DNA
gttgggactacaggtgcctg

SEQ ID NO: 289891 - DNA, 20 bp, synthetic construct
  source 1..20: mol_type = other DNA
agttgggactacaggtgcct

SEQ ID NO: 289892 - DNA, 20 bp, synthetic construct
  source 1..20: mol_type = other DNA
tagttgggactacaggtgcc

SEQ ID NO: 289893 - DNA, 20 bp, synthetic construct
  source 1..20: mol_type = other DNA
gtagttgggactacaggtgc

SEQ ID NO: 289894 - DNA, 20 bp, synthetic construct
  source 1..20: mol_type = other DNA
agtagttgggactacaggtg

SEQ ID NO: 289895 - DNA, 20 bp, synthetic construct
  source 1..20: mol_type = other DNA
aagtagttgggactacaggt

SEQ ID NO: 289896 - DNA, 20 bp, synthetic construct
  source 1..20: mol_type = other DNA
caagtagttgggactacagg

SEQ ID NO: 289897 - DNA, 20 bp, synthetic construct
  source 1..20: mol_type = other DNA
ccaagtagttgggactacag

SEQ ID NO: 289898 - DNA, 20 bp, synthetic construct
  source 1..20: mol_type = other DNA
cccaagtagttgggactaca

SEQ ID NO: 289899 - DNA, 20 bp, synthetic construct
  source 1..20: mol_type = other DNA
tcccaagtagttgggactac

SEQ ID NO: 289900 - DNA, 20 bp, synthetic construct
  source 1..20: mol_type = other DNA
ctcccaagtagttgggacta

SEQ ID NO: 289901 - DNA, 20 bp, synthetic construct
  source 1..20: mol_type = other DNA
cctcccaagtagttgggact

SEQ ID NO: 289902 - DNA, 20 bp, synthetic construct
  source 1..20: mol_type = other DNA
gcctcccaagtagttgggac

SEQ ID NO: 289903 - DNA, 20 bp, synthetic construct
  source 1..20: mol_type = other DNA
agcctcccaagtagttggga

SEQ ID NO: 289904 - DNA, 20 bp, synthetic construct
  source 1..20: mol_type = other DNA
cagcctcccaagtagttggg

SEQ ID NO: 289905 - DNA, 20 bp, synthetic construct
  source 1..20: mol_type = other DNA
tcagcctcccaagtagttgg

SEQ ID NO: 289906 - DNA, 20 bp, synthetic construct
  source 1..20: mol_type = other DNA
ctcagcctcccaagtagttg

SEQ ID NO: 289907 - DNA, 20 bp, synthetic construct
  source 1..20: mol_type = other DNA
cctcagcctcccaagtagtt

SEQ ID NO: 289908 - DNA, 20 bp, synthetic construct
  source 1..20: mol_type = other DNA
gcctcagcctcccaagtagt

SEQ ID NO: 289909 - DNA, 20 bp, synthetic construct
  source 1..20: mol_type = other DNA
tgcctcagcctcccaagtag

SEQ ID NO: 289910 - DNA, 20 bp, synthetic construct
  source 1..20: mol_type = other DNA
ctgcctcagcctcccaagta

SEQ ID NO: 289911 - DNA, 20 bp, synthetic construct
  source 1..20: mol_type = other DNA
cctgcctcagcctcccaagt

SEQ ID NO: 289912 - DNA, 20 bp, synthetic construct
  source 1..20: mol_type = other DNA
tcctgcctcagcctcccaag

SEQ ID NO: 289913 - DNA, 20 bp, synthetic construct
  source 1..20: mol_type = other DNA
ctcctgcctcagcctcccaa

SEQ ID NO: 289914 - DNA, 20 bp, synthetic construct
  source 1..20: mol_type = other DNA
tctcctgcctcagcctccca

SEQ ID NO: 289915 - DNA, 20 bp, synthetic construct
  source 1..20: mol_type = other DNA
ttctcctgcctcagcctccc

SEQ ID NO: 289916 - DNA, 20 bp, synthetic construct
  source 1..20: mol_type = other DNA
attctcctgcctcagcctcc

SEQ ID NO: 289917 - DNA, 20 bp, synthetic construct
  source 1..20: mol_type = other DNA
cattctcctgcctcagcctc

SEQ ID NO: 289918 - DNA, 20 bp, synthetic construct
  source 1..20: mol_type = other DNA
ccattctcctgcctcagcct

SEQ ID NO: 289919 - DNA, 20 bp, synthetic construct
  source 1..20: mol_type = other DNA
gccattctcctgcctcagcc

SEQ ID NO: 289920 - DNA, 20 bp, synthetic construct
  source 1..20: mol_type = other DNA
tgccattctcctgcctcagc

SEQ ID NO: 289921 - DNA, 20 bp, synthetic construct
  source 1..20: mol_type = other DNA
atgccattctcctgcctcag

SEQ ID NO: 289922 - DNA, 20 bp, synthetic construct
  source 1..20: mol_type = other DNA
catgccattctcctgcctca

SEQ ID NO: 289923 - DNA, 20 bp, synthetic construct
  source 1..20: mol_type = other DNA
tcatgccattctcctgcctc

SEQ ID NO: 289924 - DNA, 20 bp, synthetic construct
  source 1..20: mol_type = other DNA
ttcatgccattctcctgcct

SEQ ID NO: 289925 - DNA, 20 bp, synthetic construct
  source 1..20: mol_type = other DNA
gttcatgccattctcctgcc

SEQ ID NO: 289926 - DNA, 20 bp, synthetic construct
  source 1..20: mol_type = other DNA
ggttcatgccattctcctgc

SEQ ID NO: 289927 - DNA, 20 bp, synthetic construct
  source 1..20: mol_type = other DNA
aggttcatgccattctcctg

SEQ ID NO: 289928 - DNA, 20 bp, synthetic construct
  source 1..20: mol_type = other DNA
caggttcatgccattctcct

SEQ ID NO: 289929 - DNA, 20 bp, synthetic construct
  source 1..20: mol_type = other DNA
ccaggttcatgccattctcc

SEQ ID NO: 289930 - DNA, 20 bp, synthetic construct
  source 1..20: mol_type = other DNA
cccaggttcatgccattctc

SEQ ID NO: 289931 - DNA, 20 bp, synthetic construct
  source 1..20: mol_type = other DNA
tcccaggttcatgccattct

SEQ ID NO: 289932 - DNA, 20 bp, synthetic construct
  source 1..20: mol_type = other DNA
ctcccaggttcatgccattc

SEQ ID NO: 289933 - DNA, 20 bp, synthetic construct
  source 1..20: mol_type = other DNA
cctcccaggttcatgccatt

SEQ ID NO: 289934 - DNA, 20 bp, synthetic construct
  source 1..20: mol_type = other DNA
gcctcccaggttcatgccat

SEQ ID NO: 289935 - DNA, 20 bp, synthetic construct
  source 1..20: mol_type = other DNA
cgcctcccaggttcatgcca

SEQ ID NO: 289936 - DNA, 20 bp, synthetic construct
  source 1..20: mol_type = other DNA
ccgcctcccaggttcatgcc

SEQ ID NO: 289937 - DNA, 20 bp, synthetic construct
  source 1..20: mol_type = other DNA
tccgcctcccaggttcatgc

SEQ ID NO: 289938 - DNA, 20 bp, synthetic construct
  source 1..20: mol_type = other DNA
ctccgcctcccaggttcatg

SEQ ID NO: 289939 - DNA, 20 bp, synthetic construct
  source 1..20: mol_type = other DNA
gctccgcctcccaggttcat

SEQ ID NO: 289940 - DNA, 20 bp, synthetic construct
  source 1..20: mol_type = other DNA
agctccgcctcccaggttca

SEQ ID NO: 289941 - DNA, 20 bp, synthetic construct
  source 1..20: mol_type = other DNA
aagctccgcctcccaggttc

SEQ ID NO: 289942 - DNA, 20 bp, synthetic construct
  source 1..20: mol_type = other DNA
caagctccgcctcccaggtt

SEQ ID NO: 289943 - DNA, 20 bp, synthetic construct
  source 1..20: mol_type = other DNA
gcaagctccgcctcccaggt

SEQ ID NO: 289944 - DNA, 20 bp, synthetic construct
  source 1..20: mol_type = other DNA
tgcaagctccgcctcccagg

SEQ ID NO: 289945 - DNA, 20 bp, synthetic construct
  source 1..20: mol_type = other DNA
ctgcaagctccgcctcccag

SEQ ID NO: 289946 - DNA, 20 bp, synthetic construct
  source 1..20: mol_type = other DNA
actgcaagctccgcctccca

SEQ ID NO: 289947 - DNA, 20 bp, synthetic construct
  source 1..20: mol_type = other DNA
cactgcaagctccgcctccc

SEQ ID NO: 289948 - DNA, 20 bp, synthetic construct
  source 1..20: mol_type = other DNA
tcactgcaagctccgcctcc

SEQ ID NO: 289949 - DNA, 20 bp, synthetic construct
  source 1..20: mol_type = other DNA
ctcactgcaagctccgcctc

SEQ ID NO: 289950 - DNA, 20 bp, synthetic construct
  source 1..20: mol_type = other DNA
gctcactgcaagctccgcct

SEQ ID NO: 289951 - DNA, 20 bp, synthetic construct
  source 1..20: mol_type = other DNA
ggctcactgcaagctccgcc

SEQ ID NO: 289952 - DNA, 20 bp, synthetic construct
  source 1..20: mol_type = other DNA
tggctcactgcaagctccgc

SEQ ID NO: 289953 - DNA, 20 bp, synthetic construct
  source 1..20: mol_type = other DNA
ttggctcactgcaagctccg

SEQ ID NO: 289954 - DNA, 20 bp, synthetic construct
  source 1..20: mol_type = other DNA
cttggctcactgcaagctcc

SEQ ID NO: 289955 - DNA, 20 bp, synthetic construct
  source 1..20: mol_type = other DNA
tcttggctcactgcaagctc

SEQ ID NO: 289956 - DNA, 20 bp, synthetic construct
  source 1..20: mol_type = other DNA
atcttggctcactgcaagct

SEQ ID NO: 289957 - DNA, 20 bp, synthetic construct
  source 1..20: mol_type = other DNA
gatcttggctcactgcaagc

SEQ ID NO: 289958 - DNA, 20 bp, synthetic construct
  source 1..20: mol_type = other DNA
cgatcttggctcactgcaag

SEQ ID NO: 289959 - DNA, 20 bp, synthetic construct
  source 1..20: mol_type = other DNA
gcgatcttggctcactgcaa

SEQ ID NO: 289960 - DNA, 20 bp, synthetic construct
  source 1..20: mol_type = other DNA
cgcgatcttggctcactgca

SEQ ID NO: 289961 - DNA, 20 bp, synthetic construct
  source 1..20: mol_type = other DNA
gcgcgatcttggctcactgc

SEQ ID NO: 289962 - DNA, 20 bp, synthetic construct
  source 1..20: mol_type = other DNA
ggcgcgatcttggctcactg

SEQ ID NO: 289963 - DNA, 20 bp, synthetic construct
  source 1..20: mol_type = other DNA
tggcgcgatcttggctcact

SEQ ID NO: 289964 - DNA, 20 bp, synthetic construct
  source 1..20: mol_type = other DNA
gtggcgcgatcttggctcac

SEQ ID NO: 289965 - DNA, 20 bp, synthetic construct
  source 1..20: mol_type = other DNA
agtggcgcgatcttggctca

SEQ ID NO: 289966 - DNA, 20 bp, synthetic construct
  source 1..20: mol_type = other DNA
cagtggcgcgatcttggctc

SEQ ID NO: 289967 - DNA, 20 bp, synthetic construct
  source 1..20: mol_type = other DNA
gcagtggcgcgatcttggct

SEQ ID NO: 289968 - DNA, 20 bp, synthetic construct
  source 1..20: mol_type = other DNA
tgcagtggcgcgatcttggc

SEQ ID NO: 289969 - DNA, 20 bp, synthetic construct
  source 1..20: mol_type = other DNA
atgcagtggcgcgatcttgg

SEQ ID NO: 289970 - DNA, 20 bp, synthetic construct
  source 1..20: mol_type = other DNA
tatgcagtggcgcgatcttg

SEQ ID NO: 289971 - DNA, 20 bp, synthetic construct
  source 1..20: mol_type = other DNA
gtatgcagtggcgcgatctt

SEQ ID NO: 289972 - DNA, 20 bp, synthetic construct
  source 1..20: mol_type = other DNA
ggtatgcagtggcgcgatct

SEQ ID NO: 289973 - DNA, 20 bp, synthetic construct
  source 1..20: mol_type = other DNA
tggtatgcagtggcgcgatc

SEQ ID NO: 289974 - DNA, 20 bp, synthetic construct
  source 1..20: mol_type = other DNA
ctggtatgcagtggcgcgat

SEQ ID NO: 289975 - DNA, 20 bp, synthetic construct
  source 1..20: mol_type = other DNA
gctggtatgcagtggcgcga

SEQ ID NO: 289976 - DNA, 20 bp, synthetic construct
  source 1..20: mol_type = other DNA
ggctggtatgcagtggcgcg

SEQ ID NO: 289977 - DNA, 20 bp, synthetic construct
  source 1..20: mol_type = other DNA
aggctggtatgcagtggcgc

SEQ ID NO: 289978 - DNA, 20 bp, synthetic construct
  source 1..20: mol_type = other DNA
taggctggtatgcagtggcg

SEQ ID NO: 289979 - DNA, 20 bp, synthetic construct
  source 1..20: mol_type = other DNA
ctaggctggtatgcagtggc

SEQ ID NO: 289980 - DNA, 20 bp, synthetic construct
  source 1..20: mol_type = other DNA
cctaggctggtatgcagtgg

SEQ ID NO: 289981 - DNA, 20 bp, synthetic construct
  source 1..20: mol_type = other DNA
acctaggctggtatgcagtg

SEQ ID NO: 289982 - DNA, 20 bp, synthetic construct
  source 1..20: mol_type = other DNA
cacctaggctggtatgcagt

SEQ ID NO: 289983 - DNA, 20 bp, synthetic construct
  source 1..20: mol_type = other DNA
tcacctaggctggtatgcag

SEQ ID NO: 289984 - DNA, 20 bp, synthetic construct
  source 1..20: mol_type = other DNA
gtcacctaggctggtatgca

SEQ ID NO: 289985 - DNA, 20 bp, synthetic construct
  source 1..20: mol_type = other DNA
tgtcacctaggctggtatgc

SEQ ID NO: 289986 - DNA, 20 bp, synthetic construct
  source 1..20: mol_type = other DNA
ctgtcacctaggctggtatg

SEQ ID NO: 289987 - DNA, 20 bp, synthetic construct
  source 1..20: mol_type = other DNA
tctgtcacctaggctggtat

SEQ ID NO: 289988 - DNA, 20 bp, synthetic construct
  source 1..20: mol_type = other DNA
ctctgtcacctaggctggta

SEQ ID NO: 289989 - DNA, 20 bp, synthetic construct
  source 1..20: mol_type = other DNA
actctgtcacctaggctggt

SEQ ID NO: 289990 - DNA, 20 bp, synthetic construct
  source 1..20: mol_type = other DNA
cactctgtcacctaggctgg

SEQ ID NO: 289991 - DNA, 20 bp, synthetic construct
  source 1..20: mol_type = other DNA
tcactctgtcacctaggctg

SEQ ID NO: 289992 - DNA, 20 bp, synthetic construct
  source 1..20: mol_type = other DNA
ctcactctgtcacctaggct

SEQ ID NO: 289993 - DNA, 20 bp, synthetic construct
  source 1..20: mol_type = other DNA
tctcactctgtcacctaggc

SEQ ID NO: 289994 - DNA, 20 bp, synthetic construct
  source 1..20: mol_type = other DNA
gtctcactctgtcacctagg

SEQ ID NO: 289995 - DNA, 20 bp, synthetic construct
  source 1..20: mol_type = other DNA
agtctcactctgtcacctag

SEQ ID NO: 289996 - DNA, 20 bp, synthetic construct
  source 1..20: mol_type = other DNA
gagtctcactctgtcaccta

SEQ ID NO: 289997 - DNA, 20 bp, synthetic construct
  source 1..20: mol_type = other DNA
tgagtctcactctgtcacct

SEQ ID NO: 289998 - DNA, 20 bp, synthetic construct
  source 1..20: mol_type = other DNA
ctgagtctcactctgtcacc

SEQ ID NO: 289999 - DNA, 20 bp, synthetic construct
  source 1..20: mol_type = other DNA
gctgagtctcactctgtcac

SEQ ID NO: 290000 - DNA, 20 bp, synthetic construct
  source 1..20: mol_type = other DNA
tgctgagtctcactctgtca

SEQ ID NO: 290001 - DNA, 20 bp, synthetic construct
  source 1..20: mol_type = other DNA
ttgctgagtctcactctgtc

SEQ ID NO: 290002 - DNA, 20 bp, synthetic construct
  source 1..20: mol_type = other DNA
tttgctgagtctcactctgt

SEQ ID NO: 290003 - DNA, 20 bp, synthetic construct
  source 1..20: mol_type = other DNA
ttttgctgagtctcactctg

SEQ ID NO: 290004 - DNA, 20 bp, synthetic construct
  source 1..20: mol_type = other DNA
tttttgctgagtctcactct

SEQ ID NO: 290005 - DNA, 20 bp, synthetic construct
  source 1..20: mol_type = other DNA
ttttttgctgagtctcactc

SEQ ID NO: 290006 - DNA, 20 bp, synthetic construct
  source 1..20: mol_type = other DNA
tttttttgctgagtctcact

SEQ ID NO: 290007 - DNA, 20 bp, synthetic construct
  source 1..20: mol_type = other DNA
ctttttttgctgagtctcac

SEQ ID NO: 290008 - DNA, 20 bp, synthetic construct
  source 1..20: mol_type = other DNA
tctttttttgctgagtctca

SEQ ID NO: 290009 - DNA, 20 bp, synthetic construct
  source 1..20: mol_type = other DNA
ttctttttttgctgagtctc

SEQ ID NO: 290010 - DNA, 20 bp, synthetic construct
  source 1..20: mol_type = other DNA
tttctttttttgctgagtct

SEQ ID NO: 290011 - DNA, 20 bp, synthetic construct
  source 1..20: mol_type = other DNA
ctttctttttttgctgagtc

SEQ ID NO: 290012 - DNA, 20 bp, synthetic construct
  source 1..20: mol_type = other DNA
tctttctttttttgctgagt

SEQ ID NO: 290013 - DNA, 20 bp, synthetic construct
  source 1..20: mol_type = other DNA
ttctttctttttttgctgag

SEQ ID NO: 290014 - DNA, 20 bp, synthetic construct
  source 1..20: mol_type = other DNA
tttctttctttttttgctga

SEQ ID NO: 290015 - DNA, 20 bp, synthetic construct
  source 1..20: mol_type = other DNA
ctttctttctttttttgctg

SEQ ID NO: 290016 - DNA, 20 bp, synthetic construct
  source 1..20: mol_type = other DNA
tctttctttctttttttgct

SEQ ID NO: 290017 - DNA, 20 bp, synthetic construct
  source 1..20: mol_type = other DNA
ttctttctttctttttttgc

SEQ ID NO: 290018 - DNA, 20 bp, synthetic construct
  source 1..20: mol_type = other DNA
tttctttctttctttttttg

SEQ ID NO: 290019 - DNA, 20 bp, synthetic construct
  source 1..20: mol_type = other DNA
ctttctttctttcttttttt

SEQ ID NO: 290020 - DNA, 20 bp, synthetic construct
  source 1..20: mol_type = other DNA
tctttctttctttctttttt

SEQ ID NO: 290021 - DNA, 20 bp, synthetic construct
  source 1..20: mol_type = other DNA
ttctttctttctttcttttt

SEQ ID NO: 290022 - DNA, 20 bp, synthetic construct
  source 1..20: mol_type = other DNA
tttctttctttctttctttt

SEQ ID NO: 290023 - DNA, 20 bp, synthetic construct
  source 1..20: mol_type = other DNA
ctttctttctttctttcttt

SEQ ID NO: 290024 - DNA, 20 bp, synthetic construct
  source 1..20: mol_type = other DNA
tctttctttctttctttctt

SEQ ID NO: 290025 - DNA, 20 bp, synthetic construct
  source 1..20: mol_type = other DNA
ttctttctttctttctttct

SEQ ID NO: 290026 - DNA, 20 bp, synthetic construct
  source 1..20: mol_type = other DNA
tttctttctttctttctttc

SEQ ID NO: 290027 - DNA, 20 bp, synthetic construct
  source 1..20: mol_type = other DNA
atttctttctttctttcttt

SEQ ID NO: 290028 - DNA, 20 bp, synthetic construct
  source 1..20: mol_type = other DNA
gatttctttctttctttctt

SEQ ID NO: 290029 - DNA, 20 bp, synthetic construct
  source 1..20: mol_type = other DNA
tgatttctttctttctttct

SEQ ID NO: 290030 - DNA, 20 bp, synthetic construct
  source 1..20: mol_type = other DNA
ctgatttctttctttctttc

SEQ ID NO: 290031 - DNA, 20 bp, synthetic construct
  source 1..20: mol_type = other DNA
actgatttctttctttcttt

SEQ ID NO: 290032 - DNA, 20 bp, synthetic construct
  source 1..20: mol_type = other DNA
cactgatttctttctttctt

SEQ ID NO: 290033 - DNA, 20 bp, synthetic construct
  source 1..20: mol_type = other DNA
gcactgatttctttctttct

SEQ ID NO: 290034 - DNA, 20 bp, synthetic construct
  source 1..20: mol_type = other DNA
agcactgatttctttctttc

SEQ ID NO: 290035 - DNA, 20 bp, synthetic construct
  source 1..20: mol_type = other DNA
cagcactgatttctttcttt

SEQ ID NO: 290036 - DNA, 20 bp, synthetic construct
  source 1..20: mol_type = other DNA
acagcactgatttctttctt

SEQ ID NO: 290037 - DNA, 20 bp, synthetic construct
  source 1..20: mol_type = other DNA
gacagcactgatttctttct

SEQ ID NO: 290038 - DNA, 20 bp, synthetic construct
  source 1..20: mol_type = other DNA
agacagcactgatttctttc

SEQ ID NO: 290039 - DNA, 20 bp, synthetic construct
  source 1..20: mol_type = other DNA
tagacagcactgatttcttt

SEQ ID NO: 290040 - DNA, 20 bp, synthetic construct
  source 1..20: mol_type = other DNA
atagacagcactgatttctt

SEQ ID NO: 290041 - DNA, 20 bp, synthetic construct
  source 1..20: mol_type = other DNA
tatagacagcactgatttct

SEQ ID NO: 290042 - DNA, 20 bp, synthetic construct
  source 1..20: mol_type = other DNA
gtatagacagcactgatttc

SEQ ID NO: 290043 - DNA, 20 bp, synthetic construct
  source 1..20: mol_type = other DNA
agtatagacagcactgattt

SEQ ID NO: 290044 - DNA, 20 bp, synthetic construct
  source 1..20: mol_type = other DNA
aagtatagacagcactgatt

SEQ ID NO: 290045 - DNA, 20 bp, synthetic construct
  source 1..20: mol_type = other DNA
gaagtatagacagcactgat

SEQ ID NO: 290046 - DNA, 20 bp, synthetic construct
  source 1..20: mol_type = other DNA
agaagtatagacagcactga

SEQ ID NO: 290047 - DNA, 20 bp, synthetic construct
  source 1..20: mol_type = other DNA
aagaagtatagacagcactg

SEQ ID NO: 290048 - DNA, 20 bp, synthetic construct
  source 1..20: mol_type = other DNA
aaagaagtatagacagcact

SEQ ID NO: 290049 - DNA, 20 bp, synthetic construct
  source 1..20: mol_type = other DNA
gaaagaagtatagacagcac

SEQ ID NO: 290050 - DNA, 20 bp, synthetic construct
  source 1..20: mol_type = other DNA
agaaagaagtatagacagca

SEQ ID NO: 290051 - DNA, 20 bp, synthetic construct
  source 1..20: mol_type = other DNA
cagaaagaagtatagacagc

SEQ ID NO: 290052 - DNA, 20 bp, synthetic construct
  source 1..20: mol_type = other DNA
gcagaaagaagtatagacag

SEQ ID NO: 290053 - DNA, 20 bp, synthetic construct
  source 1..20: mol_type = other DNA
tgcagaaagaagtatagaca

SEQ ID NO: 290054 - DNA, 20 bp, synthetic construct
  source 1..20: mol_type = other DNA
ctgcagaaagaagtatagac

SEQ ID NO: 290055 - DNA, 20 bp, synthetic construct
  source 1..20: mol_type = other DNA
actgcagaaagaagtataga

SEQ ID NO: 290056 - DNA, 20 bp, synthetic construct
  source 1..20: mol_type = other DNA
cactgcagaaagaagtatag

SEQ ID NO: 290057 - DNA, 20 bp, synthetic construct
  source 1..20: mol_type = other DNA
tcactgcagaaagaagtata

SEQ ID NO: 290058 - DNA, 20 bp, synthetic construct
  source 1..20: mol_type = other DNA
atcactgcagaaagaagtat

SEQ ID NO: 290059 - DNA, 20 bp, synthetic construct
  source 1..20: mol_type = other DNA
catcactgcagaaagaagta

SEQ ID NO: 290060 - DNA, 20 bp, synthetic construct
  source 1..20: mol_type = other DNA
ccatcactgcagaaagaagt

SEQ ID NO: 290061 - DNA, 20 bp, synthetic construct
  source 1..20: mol_type = other DNA
tccatcactgcagaaagaag

SEQ ID NO: 290062 - DNA, 20 bp, synthetic construct
  source 1..20: mol_type = other DNA
ttccatcactgcagaaagaa

SEQ ID NO: 290063 - DNA, 20 bp, synthetic construct
  source 1..20: mol_type = other DNA
tttccatcactgcagaaaga

SEQ ID NO: 290064 - DNA, 20 bp, synthetic construct
  source 1..20: mol_type = other DNA
atttccatcactgcagaaag

SEQ ID NO: 290065 - DNA, 20 bp, synthetic construct
  source 1..20: mol_type = other DNA
tatttccatcactgcagaaa

SEQ ID NO: 290066 - DNA, 20 bp, synthetic construct
  source 1..20: mol_type = other DNA
atatttccatcactgcagaa

SEQ ID NO: 290067 - DNA, 20 bp, synthetic construct
  source 1..20: mol_type = other DNA
aatatttccatcactgcaga

SEQ ID NO: 290068 - DNA, 20 bp, synthetic construct
  source 1..20: mol_type = other DNA
gaatatttccatcactgcag

SEQ ID NO: 290069 - DNA, 20 bp, synthetic construct
  source 1..20: mol_type = other DNA
agaatatttccatcactgca

SEQ ID NO: 290070 - DNA, 20 bp, synthetic construct
  source 1..20: mol_type = other DNA
cagaatatttccatcactgc

SEQ ID NO: 290071 - DNA, 20 bp, synthetic construct
  source 1..20: mol_type = other DNA
acagaatatttccatcactg

SEQ ID NO: 290072 - DNA, 20 bp, synthetic construct
  source 1..20: mol_type = other DNA
tacagaatatttccatcact

SEQ ID NO: 290073 - DNA, 20 bp, synthetic construct
  source 1..20: mol_type = other DNA
atacagaatatttccatcac

SEQ ID NO: 290074 - DNA, 20 bp, synthetic construct
  source 1..20: mol_type = other DNA
gatacagaatatttccatca

SEQ ID NO: 290075 - DNA, 20 bp, synthetic construct
  source 1..20: mol_type = other DNA
agatacagaatatttccatc

SEQ ID NO: 290076 - DNA, 20 bp, synthetic construct
  source 1..20: mol_type = other DNA
cagatacagaatatttccat

SEQ ID NO: 290077 - DNA, 20 bp, synthetic construct
  source 1..20: mol_type = other DNA
acagatacagaatatttcca

SEQ ID NO: 290078 - DNA, 20 bp, synthetic construct
  source 1..20: mol_type = other DNA
cacagatacagaatatttcc

SEQ ID NO: 290079 - DNA, 20 bp, synthetic construct
  source 1..20: mol_type = other DNA
gcacagatacagaatatttc

SEQ ID NO: 290080 - DNA, 20 bp, synthetic construct
  source 1..20: mol_type = other DNA
agcacagatacagaatattt

SEQ ID NO: 290081 - DNA, 20 bp, synthetic construct
  source 1..20: mol_type = other DNA
cagcacagatacagaatatt

SEQ ID NO: 290082 - DNA, 20 bp, synthetic construct
  source 1..20: mol_type = other DNA
acagcacagatacagaatat

SEQ ID NO: 290083 - DNA, 20 bp, synthetic construct
  source 1..20: mol_type = other DNA
gacagcacagatacagaata

SEQ ID NO: 290084 - DNA, 20 bp, synthetic construct
  source 1..20: mol_type = other DNA
ggacagcacagatacagaat

SEQ ID NO: 290085 - DNA, 20 bp, synthetic construct
  source 1..20: mol_type = other DNA
tggacagcacagatacagaa

SEQ ID NO: 290086 - DNA, 20 bp, synthetic construct
  source 1..20: mol_type = other DNA
ctggacagcacagatacaga

SEQ ID NO: 290087 - DNA, 20 bp, synthetic construct
  source 1..20: mol_type = other DNA
actggacagcacagatacag

SEQ ID NO: 290088 - DNA, 20 bp, synthetic construct
  source 1..20: mol_type = other DNA
tactggacagcacagataca

SEQ ID NO: 290089 - DNA, 20 bp, synthetic construct
  source 1..20: mol_type = other DNA
atactggacagcacagatac

SEQ ID NO: 290090 - DNA, 20 bp, synthetic construct
  source 1..20: mol_type = other DNA
tatactggacagcacagata

SEQ ID NO: 290091 - DNA, 20 bp, synthetic construct
  source 1..20: mol_type = other DNA
ctatactggacagcacagat

SEQ ID NO: 290092 - DNA, 20 bp, synthetic construct
  source 1..20: mol_type = other DNA
actatactggacagcacaga

SEQ ID NO: 290093 - DNA, 20 bp, synthetic construct
  source 1..20: mol_type = other DNA
tactatactggacagcacag

SEQ ID NO: 290094 - DNA, 20 bp, synthetic construct
  source 1..20: mol_type = other DNA
ctactatactggacagcaca

SEQ ID NO: 290095 - DNA, 20 bp, synthetic construct
  source 1..20: mol_type = other DNA
gctactatactggacagcac

SEQ ID NO: 290096 - DNA, 20 bp, synthetic construct
  source 1..20: mol_type = other DNA
ggctactatactggacagca

SEQ ID NO: 290097 - DNA, 20 bp, synthetic construct
  source 1..20: mol_type = other DNA
tggctactatactggacagc

SEQ ID NO: 290098 - DNA, 20 bp, synthetic construct
  source 1..20: mol_type = other DNA
gtggctactatactggacag

SEQ ID NO: 290099 - DNA, 20 bp, synthetic construct
  source 1..20: mol_type = other DNA
agtggctactatactggaca

SEQ ID NO: 290100 - DNA, 20 bp, synthetic construct
  source 1..20: mol_type = other DNA
tagtggctactatactggac

SEQ ID NO: 290101 - DNA, 20 bp, synthetic construct
  source 1..20: mol_type = other DNA
ctagtggctactatactgga

SEQ ID NO: 290102 - DNA, 20 bp, synthetic construct
  source 1..20: mol_type = other DNA
gctagtggctactatactgg

SEQ ID NO: 290103 - DNA, 20 bp, synthetic construct
  source 1..20: mol_type = other DNA
agctagtggctactatactg

SEQ ID NO: 290104 - DNA, 20 bp, synthetic construct
  source 1..20: mol_type = other DNA
tagctagtggctactatact

SEQ ID NO: 290105 - DNA, 20 bp, synthetic construct
  source 1..20: mol_type = other DNA
gtagctagtggctactatac

SEQ ID NO: 290106 - DNA, 20 bp, synthetic construct
  source 1..20: mol_type = other DNA
tgtagctagtggctactata

SEQ ID NO: 290107 - DNA, 20 bp, synthetic construct
  source 1..20: mol_type = other DNA
atgtagctagtggctactat

SEQ ID NO: 290108 - DNA, 20 bp, synthetic construct
  source 1..20: mol_type = other DNA
catgtagctagtggctacta

SEQ ID NO: 290109 - DNA, 20 bp, synthetic construct
  source 1..20: mol_type = other DNA
acatgtagctagtggctact

SEQ ID NO: 290110 - DNA, 20 bp, synthetic construct
  source 1..20: mol_type = other DNA
cacatgtagctagtggctac

SEQ ID NO: 290111 - DNA, 20 bp, synthetic construct
  source 1..20: mol_type = other DNA
ccacatgtagctagtggcta

SEQ ID NO: 290112 - DNA, 20 bp, synthetic construct
  source 1..20: mol_type = other DNA
gccacatgtagctagtggct

SEQ ID NO: 290113 - DNA, 20 bp, synthetic construct
  source 1..20: mol_type = other DNA
tgccacatgtagctagtggc

SEQ ID NO: 290114 - DNA, 20 bp, synthetic construct
  source 1..20: mol_type = other DNA
gtgccacatgtagctagtgg

SEQ ID NO: 290115 - DNA, 20 bp, synthetic construct
  source 1..20: mol_type = other DNA
agtgccacatgtagctagtg

SEQ ID NO: 290116 - DNA, 20 bp, synthetic construct
  source 1..20: mol_type = other DNA
aagtgccacatgtagctagt

SEQ ID NO: 290117 - DNA, 20 bp, synthetic construct
  source 1..20: mol_type = other DNA
caagtgccacatgtagctag

SEQ ID NO: 290118 - DNA, 20 bp, synthetic construct
  source 1..20: mol_type = other DNA
tcaagtgccacatgtagcta

SEQ ID NO: 290119 - DNA, 20 bp, synthetic construct
  source 1..20: mol_type = other DNA
ttcaagtgccacatgtagct

SEQ ID NO: 290120 - DNA, 20 bp, synthetic construct
  source 1..20: mol_type = other DNA
tttcaagtgccacatgtagc

SEQ ID NO: 290121 - DNA, 20 bp, synthetic construct
  source 1..20: mol_type = other DNA
gtttcaagtgccacatgtag

SEQ ID NO: 290122 - DNA, 20 bp, synthetic construct
  source 1..20: mol_type = other DNA
tgtttcaagtgccacatgta

SEQ ID NO: 290123 - DNA, 20 bp, synthetic construct
  source 1..20: mol_type = other DNA
atgtttcaagtgccacatgt

SEQ ID NO: 290124 - DNA, 20 bp, synthetic construct
  source 1..20: mol_type = other DNA
catgtttcaagtgccacatg

SEQ ID NO: 290125 - DNA, 20 bp, synthetic construct
  source 1..20: mol_type = other DNA
ccatgtttcaagtgccacat

SEQ ID NO: 290126 - DNA, 20 bp, synthetic construct
  source 1..20: mol_type = other DNA
gccatgtttcaagtgccaca

SEQ ID NO: 290127 - DNA, 20 bp, synthetic construct
  source 1..20: mol_type = other DNA
agccatgtttcaagtgccac

SEQ ID NO: 290128 - DNA, 20 bp, synthetic construct
  source 1..20: mol_type = other DNA
cagccatgtttcaagtgcca

SEQ ID NO: 290129 - DNA, 20 bp, synthetic construct
  source 1..20: mol_type = other DNA
ccagccatgtttcaagtgcc

SEQ ID NO: 290130 - DNA, 20 bp, synthetic construct
  source 1..20: mol_type = other DNA
accagccatgtttcaagtgc

SEQ ID NO: 290131 - DNA, 20 bp, synthetic construct
  source 1..20: mol_type = other DNA
taccagccatgtttcaagtg

SEQ ID NO: 290132 - DNA, 20 bp, synthetic construct
  source 1..20: mol_type = other DNA
gtaccagccatgtttcaagt

SEQ ID NO: 290133 - DNA, 20 bp, synthetic construct
  source 1..20: mol_type = other DNA
tgtaccagccatgtttcaag

SEQ ID NO: 290134 - DNA, 20 bp, synthetic construct
  source 1..20: mol_type = other DNA
ctgtaccagccatgtttcaa

SEQ ID NO: 290135 - DNA, 20 bp, synthetic construct
  source 1..20: mol_type = other DNA
actgtaccagccatgtttca

SEQ ID NO: 290136 - DNA, 20 bp, synthetic construct
  source 1..20: mol_type = other DNA
aactgtaccagccatgtttc

SEQ ID NO: 290137 - DNA, 20 bp, synthetic construct
  source 1..20: mol_type = other DNA
caactgtaccagccatgttt

SEQ ID NO: 290138 - DNA, 20 bp, synthetic construct
  source 1..20: mol_type = other DNA
tcaactgtaccagccatgtt

SEQ ID NO: 290139 - DNA, 20 bp, synthetic construct
  source 1..20: mol_type = other DNA
ctcaactgtaccagccatgt

SEQ ID NO: 290140 - DNA, 20 bp, synthetic construct
  source 1..20: mol_type = other DNA
cctcaactgtaccagccatg

SEQ ID NO: 290141 - DNA, 20 bp, synthetic construct
  source 1..20: mol_type = other DNA
tcctcaactgtaccagccat

SEQ ID NO: 290142 - DNA, 20 bp, synthetic construct
  source 1..20: mol_type = other DNA
ttcctcaactgtaccagcca

SEQ ID NO: 290143 - DNA, 20 bp, synthetic construct
  source 1..20: mol_type = other DNA
cttcctcaactgtaccagcc

SEQ ID NO: 290144 - DNA, 20 bp, synthetic construct
  source 1..20: mol_type = other DNA
tcttcctcaactgtaccagc

SEQ ID NO: 290145 - DNA, 20 bp, synthetic construct
  source 1..20: mol_type = other DNA
ctcttcctcaactgtaccag

SEQ ID NO: 290146 - DNA, 20 bp, synthetic construct
  source 1..20: mol_type = other DNA
actcttcctcaactgtacca

SEQ ID NO: 290147 - DNA, 20 bp, synthetic construct
  source 1..20: mol_type = other DNA
cactcttcctcaactgtacc

SEQ ID NO: 290148 - DNA, 20 bp, synthetic construct
  source 1..20: mol_type = other DNA
ccactcttcctcaactgtac

SEQ ID NO: 290149 - DNA, 20 bp, synthetic construct
  source 1..20: mol_type = other DNA
gccactcttcctcaactgta

SEQ ID NO: 290150 - DNA, 20 bp, synthetic construct
  source 1..20: mol_type = other DNA
agccactcttcctcaactgt

SEQ ID NO: 290151 - DNA, 20 bp, synthetic construct
  source 1..20: mol_type = other DNA
cagccactcttcctcaactg

SEQ ID NO: 290152 - DNA, 20 bp, synthetic construct
  source 1..20: mol_type = other DNA
gcagccactcttcctcaact

SEQ ID NO: 290153 - DNA, 20 bp, synthetic construct
  source 1..20: mol_type = other DNA
ggcagccactcttcctcaac

SEQ ID NO: 290154 - DNA, 20 bp, synthetic construct
  source 1..20: mol_type = other DNA
tggcagccactcttcctcaa

SEQ ID NO: 290155 - DNA, 20 bp, synthetic construct
  source 1..20: mol_type = other DNA
atggcagccactcttcctca

SEQ ID NO: 290156 - DNA, 20 bp, synthetic construct
  source 1..20: mol_type = other DNA
tatggcagccactcttcctc

SEQ ID NO: 290157 - DNA, 20 bp, synthetic construct
  source 1..20: mol_type = other DNA
atatggcagccactcttcct

SEQ ID NO: 290158 - DNA, 20 bp, synthetic construct
  source 1..20: mol_type = other DNA
gatatggcagccactcttcc

SEQ ID NO: 290159 - DNA, 20 bp, synthetic construct
  source 1..20: mol_type = other DNA
cgatatggcagccactcttc

SEQ ID NO: 290160 - DNA, 20 bp, synthetic construct
  source 1..20: mol_type = other DNA
ccgatatggcagccactctt

SEQ ID NO: 290161 - DNA, 20 bp, synthetic construct
  source 1..20: mol_type = other DNA
tccgatatggcagccactct

SEQ ID NO: 290162 - DNA, 20 bp, synthetic construct
  source 1..20: mol_type = other DNA
gtccgatatggcagccactc

SEQ ID NO: 290163 - DNA, 20 bp, synthetic construct
  source 1..20: mol_type = other DNA
cgtccgatatggcagccact

SEQ ID NO: 290164 - DNA, 20 bp, synthetic construct
  source 1..20: mol_type = other DNA
tcgtccgatatggcagccac

SEQ ID NO: 290165 - DNA, 20 bp, synthetic construct
  source 1..20: mol_type = other DNA
gtcgtccgatatggcagcca

SEQ ID NO: 290166 - DNA, 20 bp, synthetic construct
  source 1..20: mol_type = other DNA
tgtcgtccgatatggcagcc

SEQ ID NO: 290167 - DNA, 20 bp, synthetic construct
  source 1..20: mol_type = other DNA
gtgtcgtccgatatggcagc

SEQ ID NO: 290168 - DNA, 20 bp, synthetic construct
  source 1..20: mol_type = other DNA
tgtgtcgtccgatatggcag

SEQ ID NO: 290169 - DNA, 20 bp, synthetic construct
  source 1..20: mol_type = other DNA
ctgtgtcgtccgatatggca

SEQ ID NO: 290170 - DNA, 20 bp, synthetic construct
  source 1..20: mol_type = other DNA
gctgtgtcgtccgatatggc

SEQ ID NO: 290171 - DNA, 20 bp, synthetic construct
  source 1..20: mol_type = other DNA
agctgtgtcgtccgatatgg

SEQ ID NO: 290172 - DNA, 20 bp, synthetic construct
  source 1..20: mol_type = other DNA
tagctgtgtcgtccgatatg

SEQ ID NO: 290173 - DNA, 20 bp, synthetic construct
  source 1..20: mol_type = other DNA
atagctgtgtcgtccgatat

SEQ ID NO: 290174 - DNA, 20 bp, synthetic construct
  source 1..20: mol_type = other DNA
tatagctgtgtcgtccgata

SEQ ID NO: 290175 - DNA, 20 bp, synthetic construct
  source 1..20: mol_type = other DNA
ctatagctgtgtcgtccgat

SEQ ID NO: 290176 - DNA, 20 bp, synthetic construct
  source 1..20: mol_type = other DNA
tctatagctgtgtcgtccga

SEQ ID NO: 290177 - DNA, 20 bp, synthetic construct
  source 1..20: mol_type = other DNA
atctatagctgtgtcgtccg

SEQ ID NO: 290178 - DNA, 20 bp, synthetic construct
  source 1..20: mol_type = other DNA
aatctatagctgtgtcgtcc

SEQ ID NO: 290179 - DNA, 20 bp, synthetic construct
  source 1..20: mol_type = other DNA
gaatctatagctgtgtcgtc

SEQ ID NO: 290180 - DNA, 20 bp, synthetic construct
  source 1..20: mol_type = other DNA
agaatctatagctgtgtcgt

SEQ ID NO: 290181 - DNA, 20 bp, synthetic construct
  source 1..20: mol_type = other DNA
cagaatctatagctgtgtcg

SEQ ID NO: 290182 - DNA, 20 bp, synthetic construct
  source 1..20: mol_type = other DNA
acagaatctatagctgtgtc

SEQ ID NO: 290183 - DNA, 20 bp, synthetic construct
  source 1..20: mol_type = other DNA
gacagaatctatagctgtgt

SEQ ID NO: 290184 - DNA, 20 bp, synthetic construct
  source 1..20: mol_type = other DNA
tgacagaatctatagctgtg

SEQ ID NO: 290185 - DNA, 20 bp, synthetic construct
  source 1..20: mol_type = other DNA
gtgacagaatctatagctgt

SEQ ID NO: 290186 - DNA, 20 bp, synthetic construct
  source 1..20: mol_type = other DNA
ggtgacagaatctatagctg

SEQ ID NO: 290187 - DNA, 20 bp, synthetic construct
  source 1..20: mol_type = other DNA
gggtgacagaatctatagct

SEQ ID NO: 290188 - DNA, 20 bp, synthetic construct
  source 1..20: mol_type = other DNA
ggggtgacagaatctatagc

SEQ ID NO: 290189 - DNA, 20 bp, synthetic construct
  source 1..20: mol_type = other DNA
tggggtgacagaatctatag

SEQ ID NO: 290190 - DNA, 20 bp, synthetic construct
  source 1..20: mol_type = other DNA
gtggggtgacagaatctata

SEQ ID NO: 290191 - DNA, 20 bp, synthetic construct
  source 1..20: mol_type = other DNA
ggtggggtgacagaatctat

SEQ ID NO: 290192 - DNA, 20 bp, synthetic construct
  source 1..20: mol_type = other DNA
gggtggggtgacagaatcta

SEQ ID NO: 290193 - DNA, 20 bp, synthetic construct
  source 1..20: mol_type = other DNA
ggggtggggtgacagaatct

SEQ ID NO: 290194 - DNA, 20 bp, synthetic construct
  source 1..20: mol_type = other DNA
cggggtggggtgacagaatc

SEQ ID NO: 290195 - DNA, 20 bp, synthetic construct
  source 1..20: mol_type = other DNA
tcggggtggggtgacagaat

SEQ ID NO: 290196 - DNA, 20 bp, synthetic construct
  source 1..20: mol_type = other DNA
ctcggggtggggtgacagaa

SEQ ID NO: 290197 - DNA, 20 bp, synthetic construct
  source 1..20: mol_type = other DNA
tctcggggtggggtgacaga

SEQ ID NO: 290198 - DNA, 20 bp, synthetic construct
  source 1..20: mol_type = other DNA
ctctcggggtggggtgacag

SEQ ID NO: 290199 - DNA, 20 bp, synthetic construct
  source 1..20: mol_type = other DNA
actctcggggtggggtgaca

SEQ ID NO: 290200 - DNA, 20 bp, synthetic construct
  source 1..20: mol_type = other DNA
gactctcggggtggggtgac

SEQ ID NO: 290201 - DNA, 20 bp, synthetic construct
  source 1..20: mol_type = other DNA
ggactctcggggtggggtga

SEQ ID NO: 290202 - DNA, 20 bp, synthetic construct
  source 1..20: mol_type = other DNA
tggactctcggggtggggtg

SEQ ID NO: 290203 - DNA, 20 bp, synthetic construct
  source 1..20: mol_type = other DNA
ctggactctcggggtggggt

SEQ ID NO: 290204 - DNA, 20 bp, synthetic construct
  source 1..20: mol_type = other DNA
tctggactctcggggtgggg

SEQ ID NO: 290205 - DNA, 20 bp, synthetic construct
  source 1..20: mol_type = other DNA
ctctggactctcggggtggg

SEQ ID NO: 290206 - DNA, 20 bp, synthetic construct
  source 1..20: mol_type = other DNA
gctctggactctcggggtgg

SEQ ID NO: 290207 - DNA, 20 bp, synthetic construct
  source 1..20: mol_type = other DNA
cgctctggactctcggggtg

SEQ ID NO: 290208 - DNA, 20 bp, synthetic construct
  source 1..20: mol_type = other DNA
ccgctctggactctcggggt

SEQ ID NO: 290209 - DNA, 20 bp, synthetic construct
  source 1..20: mol_type = other DNA
cccgctctggactctcgggg

SEQ ID NO: 290210 - DNA, 20 bp, synthetic construct
  source 1..20: mol_type = other DNA
ccccgctctggactctcggg

SEQ ID NO: 290211 - DNA, 20 bp, synthetic construct
  source 1..20: mol_type = other DNA
tccccgctctggactctcgg

SEQ ID NO: 290212 - DNA, 20 bp, synthetic construct
  source 1..20: mol_type = other DNA
gtccccgctctggactctcg

SEQ ID NO: 290213 - DNA, 20 bp, synthetic construct
  source 1..20: mol_type = other DNA
agtccccgctctggactctc

SEQ ID NO: 290214 - DNA, 20 bp, synthetic construct
  source 1..20: mol_type = other DNA
aagtccccgctctggactct

SEQ ID NO: 290215 - DNA, 20 bp, synthetic construct
  source 1..20: mol_type = other DNA
gaagtccccgctctggactc

SEQ ID NO: 290216 - DNA, 20 bp, synthetic construct
  source 1..20: mol_type = other DNA
agaagtccccgctctggact

SEQ ID NO: 290217 - DNA, 20 bp, synthetic construct
  source 1..20: mol_type = other DNA
cagaagtccccgctctggac

SEQ ID NO: 290218 - DNA, 20 bp, synthetic construct
  source 1..20: mol_type = other DNA
gcagaagtccccgctctgga

SEQ ID NO: 290219 - DNA, 20 bp, synthetic construct
  source 1..20: mol_type = other DNA
ggcagaagtccccgctctgg

SEQ ID NO: 290220 - DNA, 20 bp, synthetic construct
  source 1..20: mol_type = other DNA
aggcagaagtccccgctctg

SEQ ID NO: 290221 - DNA, 20 bp, synthetic construct
  source 1..20: mol_type = other DNA
aaggcagaagtccccgctct

SEQ ID NO: 290222 - DNA, 20 bp, synthetic construct
  source 1..20: mol_type = other DNA
taaggcagaagtccccgctc

SEQ ID NO: 290223 - DNA, 20 bp, synthetic construct
  source 1..20: mol_type = other DNA
ctaaggcagaagtccccgct

SEQ ID NO: 290224 - DNA, 20 bp, synthetic construct
  source 1..20: mol_type = other DNA
cctaaggcagaagtccccgc

SEQ ID NO: 290225 - DNA, 20 bp, synthetic construct
  source 1..20: mol_type = other DNA
gcctaaggcagaagtccccg

SEQ ID NO: 290226 - DNA, 20 bp, synthetic construct
  source 1..20: mol_type = other DNA
ggcctaaggcagaagtcccc

SEQ ID NO: 290227 - DNA, 20 bp, synthetic construct
  source 1..20: mol_type = other DNA
gggcctaaggcagaagtccc

SEQ ID NO: 290228 - DNA, 20 bp, synthetic construct
  source 1..20: mol_type = other DNA
agggcctaaggcagaagtcc

SEQ ID NO: 290229 - DNA, 20 bp, synthetic construct
  source 1..20: mol_type = other DNA
tagggcctaaggcagaagtc

SEQ ID NO: 290230 - DNA, 20 bp, synthetic construct
  source 1..20: mol_type = other DNA
atagggcctaaggcagaagt

SEQ ID NO: 290231 - DNA, 20 bp, synthetic construct
  source 1..20: mol_type = other DNA
aatagggcctaaggcagaag

SEQ ID NO: 290232 - DNA, 20 bp, synthetic construct
  source 1..20: mol_type = other DNA
gaatagggcctaaggcagaa

SEQ ID NO: 290233 - DNA, 20 bp, synthetic construct
  source 1..20: mol_type = other DNA
tgaatagggcctaaggcaga

SEQ ID NO: 290234 - DNA, 20 bp, synthetic construct
  source 1..20: mol_type = other DNA
ctgaatagggcctaaggcag

SEQ ID NO: 290235 - DNA, 20 bp, synthetic construct
  source 1..20: mol_type = other DNA
cctgaatagggcctaaggca

SEQ ID NO: 290236 - DNA, 20 bp, synthetic construct
  source 1..20: mol_type = other DNA
ccctgaatagggcctaaggc

SEQ ID NO: 290237 - DNA, 20 bp, synthetic construct
  source 1..20: mol_type = other DNA
gccctgaatagggcctaagg

SEQ ID NO: 290238 - DNA, 20 bp, synthetic construct
  source 1..20: mol_type = other DNA
agccctgaatagggcctaag

SEQ ID NO: 290239 - DNA, 20 bp, synthetic construct
  source 1..20: mol_type = other DNA
cagccctgaatagggcctaa

SEQ ID NO: 290240 - DNA, 20 bp, synthetic construct
  source 1..20: mol_type = other DNA
tcagccctgaatagggccta

SEQ ID NO: 290241 - DNA, 20 bp, synthetic construct
  source 1..20: mol_type = other DNA
atcagccctgaatagggcct

SEQ ID NO: 290242 - DNA, 20 bp, synthetic construct
  source 1..20: mol_type = other DNA
aatcagccctgaatagggcc

SEQ ID NO: 290243 - DNA, 20 bp, synthetic construct
  source 1..20: mol_type = other DNA
aaatcagccctgaatagggc

SEQ ID NO: 290244 - DNA, 20 bp, synthetic construct
  source 1..20: mol_type = other DNA
aaaatcagccctgaataggg

SEQ ID NO: 290245 - DNA, 20 bp, synthetic construct
  source 1..20: mol_type = other DNA
aaaaatcagccctgaatagg

SEQ ID NO: 290246 - DNA, 20 bp, synthetic construct
  source 1..20: mol_type = other DNA
taaaaatcagccctgaatag

SEQ ID NO: 290247 - DNA, 20 bp, synthetic construct
  source 1..20: mol_type = other DNA
gtaaaaatcagccctgaata

SEQ ID NO: 290248 - DNA, 20 bp, synthetic construct
  source 1..20: mol_type = other DNA
agtaaaaatcagccctgaat

SEQ ID NO: 290249 - DNA, 20 bp, synthetic construct
  source 1..20: mol_type = other DNA
aagtaaaaatcagccctgaa

SEQ ID NO: 290250 - DNA, 20 bp, synthetic construct
  source 1..20: mol_type = other DNA
caagtaaaaatcagccctga

SEQ ID NO: 290251 - DNA, 20 bp, synthetic construct
  source 1..20: mol_type = other DNA
tcaagtaaaaatcagccctg

SEQ ID NO: 290252 - DNA, 20 bp, synthetic construct
  source 1..20: mol_type = other DNA
ttcaagtaaaaatcagccct

SEQ ID NO: 290253 - DNA, 20 bp, synthetic construct
  source 1..20: mol_type = other DNA
gttcaagtaaaaatcagccc

SEQ ID NO: 290254 - DNA, 20 bp, synthetic construct
  source 1..20: mol_type = other DNA
ggttcaagtaaaaatcagcc

SEQ ID NO: 290255 - DNA, 20 bp, synthetic construct
  source 1..20: mol_type = other DNA
gggttcaagtaaaaatcagc

SEQ ID NO: 290256 - DNA, 20 bp, synthetic construct
  source 1..20: mol_type = other DNA
agggttcaagtaaaaatcag

SEQ ID NO: 290257 - DNA, 20 bp, synthetic construct
  source 1..20: mol_type = other DNA
aagggttcaagtaaaaatca

SEQ ID NO: 290258 - DNA, 20 bp, synthetic construct
  source 1..20: mol_type = other DNA
taagggttcaagtaaaaatc

SEQ ID NO: 290259 - DNA, 20 bp, synthetic construct
  source 1..20: mol_type = other DNA
gtaagggttcaagtaaaaat

SEQ ID NO: 290260 - DNA, 20 bp, synthetic construct
  source 1..20: mol_type = other DNA
agtaagggttcaagtaaaaa

SEQ ID NO: 290261 - DNA, 20 bp, synthetic construct
  source 1..20: mol_type = other DNA
cagtaagggttcaagtaaaa

SEQ ID NO: 290262 - DNA, 20 bp, synthetic construct
  source 1..20: mol_type = other DNA
acagtaagggttcaagtaaa

SEQ ID NO: 290263 - DNA, 20 bp, synthetic construct
  source 1..20: mol_type = other DNA
cacagtaagggttcaagtaa

SEQ ID NO: 290264 - DNA, 20 bp, synthetic construct
  source 1..20: mol_type = other DNA
ccacagtaagggttcaagta

SEQ ID NO: 290265 - DNA, 20 bp, synthetic construct
  source 1..20: mol_type = other DNA
cccacagtaagggttcaagt

SEQ ID NO: 290266 - DNA, 20 bp, synthetic construct
  source 1..20: mol_type = other DNA
tcccacagtaagggttcaag

SEQ ID NO: 290267 - DNA, 20 bp, synthetic construct
  source 1..20: mol_type = other DNA
ttcccacagtaagggttcaa

SEQ ID NO: 290268 - DNA, 20 bp, synthetic construct
  source 1..20: mol_type = other DNA
cttcccacagtaagggttca

SEQ ID NO: 290269 - DNA, 20 bp, synthetic construct
  source 1..20: mol_type = other DNA
tcttcccacagtaagggttc

SEQ ID NO: 290270 - DNA, 20 bp, synthetic construct
  source 1..20: mol_type = other DNA
ctcttcccacagtaagggtt

SEQ ID NO: 290271 - DNA, 20 bp, synthetic construct
  source 1..20: mol_type = other DNA
tctcttcccacagtaagggt

SEQ ID NO: 290272 - DNA, 20 bp, synthetic construct
  source 1..20: mol_type = other DNA
ttctcttcccacagtaaggg

SEQ ID NO: 290273 - DNA, 20 bp, synthetic construct
  source 1..20: mol_type = other DNA
cttctcttcccacagtaagg

SEQ ID NO: 290274 - DNA, 20 bp, synthetic construct
  source 1..20: mol_type = other DNA
ccttctcttcccacagtaag

SEQ ID NO: 290275 - DNA, 20 bp, synthetic construct
  source 1..20: mol_type = other DNA
gccttctcttcccacagtaa

SEQ ID NO: 290276 - DNA, 20 bp, synthetic construct
  source 1..20: mol_type = other DNA
ggccttctcttcccacagta

SEQ ID NO: 290277 - DNA, 20 bp, synthetic construct
  source 1..20: mol_type = other DNA
tggccttctcttcccacagt

SEQ ID NO: 290278 - DNA, 20 bp, synthetic construct
  source 1..20: mol_type = other DNA
atggccttctcttcccacag

SEQ ID NO: 290279 - DNA, 20 bp, synthetic construct
  source 1..20: mol_type = other DNA
catggccttctcttcccaca

SEQ ID NO: 290280 - DNA, 20 bp, synthetic construct
  source 1..20: mol_type = other DNA
tcatggccttctcttcccac

SEQ ID NO: 290281 - DNA, 20 bp, synthetic construct
  source 1..20: mol_type = other DNA
ctcatggccttctcttccca

SEQ ID NO: 290282 - DNA, 20 bp, synthetic construct
  source 1..20: mol_type = other DNA
tctcatggccttctcttccc

SEQ ID NO: 290283 - DNA, 20 bp, synthetic construct
  source 1..20: mol_type = other DNA
ttctcatggccttctcttcc

SEQ ID NO: 290284 - DNA, 20 bp, synthetic construct
  source 1..20: mol_type = other DNA
cttctcatggccttctcttc

SEQ ID NO: 290285 - DNA, 20 bp, synthetic construct
  source 1..20: mol_type = other DNA
acttctcatggccttctctt

SEQ ID NO: 290286 - DNA, 20 bp, synthetic construct
  source 1..20: mol_type = other DNA
aacttctcatggccttctct

SEQ ID NO: 290287 - DNA, 20 bp, synthetic construct
  source 1..20: mol_type = other DNA
gaacttctcatggccttctc

SEQ ID NO: 290288 - DNA, 20 bp, synthetic construct
  source 1..20: mol_type = other DNA
tgaacttctcatggccttct

SEQ ID NO: 290289 - DNA, 20 bp, synthetic construct
  source 1..20: mol_type = other DNA
ctgaacttctcatggccttc

SEQ ID NO: 290290 - DNA, 20 bp, synthetic construct
  source 1..20: mol_type = other DNA
actgaacttctcatggcctt

SEQ ID NO: 290291 - DNA, 20 bp, synthetic construct
  source 1..20: mol_type = other DNA
gactgaacttctcatggcct

SEQ ID NO: 290292 - DNA, 20 bp, synthetic construct
  source 1..20: mol_type = other DNA
agactgaacttctcatggcc

SEQ ID NO: 290293 - DNA, 20 bp, synthetic construct
  source 1..20: mol_type = other DNA
tagactgaacttctcatggc

SEQ ID NO: 290294 - DNA, 20 bp, synthetic construct
  source 1..20: mol_type = other DNA
ctagactgaacttctcatgg

SEQ ID NO: 290295 - DNA, 20 bp, synthetic construct
  source 1..20: mol_type = other DNA
tctagactgaacttctcatg

SEQ ID NO: 290296 - DNA, 20 bp, synthetic construct
  source 1..20: mol_type = other DNA
ttctagactgaacttctcat

SEQ ID NO: 290297 - DNA, 20 bp, synthetic construct
  source 1..20: mol_type = other DNA
attctagactgaacttctca

SEQ ID NO: 290298 - DNA, 20 bp, synthetic construct
  source 1..20: mol_type = other DNA
cattctagactgaacttctc

SEQ ID NO: 290299 - DNA, 20 bp, synthetic construct
  source 1..20: mol_type = other DNA
acattctagactgaacttct

SEQ ID NO: 290300 - DNA, 20 bp, synthetic construct
  source 1..20: mol_type = other DNA
cacattctagactgaacttc

SEQ ID NO: 290301 - DNA, 20 bp, synthetic construct
  source 1..20: mol_type = other DNA
tcacattctagactgaactt

SEQ ID NO: 290302 - DNA, 20 bp, synthetic construct
  source 1..20: mol_type = other DNA
gtcacattctagactgaact

SEQ ID NO: 290303 - DNA, 20 bp, synthetic construct
  source 1..20: mol_type = other DNA
agtcacattctagactgaac

SEQ ID NO: 290304 - DNA, 20 bp, synthetic construct
  source 1..20: mol_type = other DNA
gagtcacattctagactgaa

SEQ ID NO: 290305 - DNA, 20 bp, synthetic construct
  source 1..20: mol_type = other DNA
ggagtcacattctagactga

SEQ ID NO: 290306 - DNA, 20 bp, synthetic construct
  source 1..20: mol_type = other DNA
aggagtcacattctagactg

SEQ ID NO: 290307 - DNA, 20 bp, synthetic construct
  source 1..20: mol_type = other DNA
aaggagtcacattctagact

SEQ ID NO: 290308 - DNA, 20 bp, synthetic construct
  source 1..20: mol_type = other DNA
taaggagtcacattctagac

SEQ ID NO: 290309 - DNA, 20 bp, synthetic construct
  source 1..20: mol_type = other DNA
ataaggagtcacattctaga

SEQ ID NO: 290310 - DNA, 20 bp, synthetic construct
  source 1..20: mol_type = other DNA
aataaggagtcacattctag

SEQ ID NO: 290311 - DNA, 20 bp, synthetic construct
  source 1..20: mol_type = other DNA
aaataaggagtcacattcta

SEQ ID NO: 290312 - DNA, 20 bp, synthetic construct
  source 1..20: mol_type = other DNA
aaaataaggagtcacattct

SEQ ID NO: 290313 - DNA, 20 bp, synthetic construct
  source 1..20: mol_type = other DNA
gaaaataaggagtcacattc

SEQ ID NO: 290314 - DNA, 20 bp, synthetic construct
  source 1..20: mol_type = other DNA
agaaaataaggagtcacatt

SEQ ID NO: 290315 - DNA, 20 bp, synthetic construct
  source 1..20: mol_type = other DNA
cagaaaataaggagtcacat

SEQ ID NO: 290316 - DNA, 20 bp, synthetic construct
  source 1..20: mol_type = other DNA
ccagaaaataaggagtcaca

SEQ ID NO: 290317 - DNA, 20 bp, synthetic construct
  source 1..20: mol_type = other DNA
gccagaaaataaggagtcac

SEQ ID NO: 290318 - DNA, 20 bp, synthetic construct
  source 1..20: mol_type = other DNA
agccagaaaataaggagtca

SEQ ID NO: 290319 - DNA, 20 bp, synthetic construct
  source 1..20: mol_type = other DNA
gagccagaaaataaggagtc

SEQ ID NO: 290320 - DNA, 20 bp, synthetic construct
  source 1..20: mol_type = other DNA
ggagccagaaaataaggagt

SEQ ID NO: 290321 - DNA, 20 bp, synthetic construct
  source 1..20: mol_type = other DNA
gggagccagaaaataaggag

SEQ ID NO: 290322 - DNA, 20 bp, synthetic construct
  source 1..20: mol_type = other DNA
agggagccagaaaataagga

SEQ ID NO: 290323 - DNA, 20 bp, synthetic construct
  source 1..20: mol_type = other DNA
aagggagccagaaaataagg

SEQ ID NO: 290324 - DNA, 20 bp, synthetic construct
  source 1..20: mol_type = other DNA
caagggagccagaaaataag

SEQ ID NO: 290325 - DNA, 20 bp, synthetic construct
  source 1..20: mol_type = other DNA
ccaagggagccagaaaataa

SEQ ID NO: 290326 - DNA, 20 bp, synthetic construct
  source 1..20: mol_type = other DNA
tccaagggagccagaaaata

SEQ ID NO: 290327 - DNA, 20 bp, synthetic construct
  source 1..20: mol_type = other DNA
gtccaagggagccagaaaat

SEQ ID NO: 290328 - DNA, 20 bp, synthetic construct
  source 1..20: mol_type = other DNA
tgtccaagggagccagaaaa

SEQ ID NO: 290329 - DNA, 20 bp, synthetic construct
  source 1..20: mol_type = other DNA
gtgtccaagggagccagaaa

SEQ ID NO: 290330 - DNA, 20 bp, synthetic construct
  source 1..20: mol_type = other DNA
agtgtccaagggagccagaa

SEQ ID NO: 290331 - DNA, 20 bp, synthetic construct
  source 1..20: mol_type = other DNA
aagtgtccaagggagccaga

SEQ ID NO: 290332 - DNA, 20 bp, synthetic construct
  source 1..20: mol_type = other DNA
aaagtgtccaagggagccag

SEQ ID NO: 290333 - DNA, 20 bp, synthetic construct
  source 1..20: mol_type = other DNA
caaagtgtccaagggagcca

SEQ ID NO: 290334 - DNA, 20 bp, synthetic construct
  source 1..20: mol_type = other DNA
acaaagtgtccaagggagcc

SEQ ID NO: 290335 - DNA, 20 bp, synthetic construct
  source 1..20: mol_type = other DNA
cacaaagtgtccaagggagc

SEQ ID NO: 290336 - DNA, 20 bp, synthetic construct
  source 1..20: mol_type = other DNA
ccacaaagtgtccaagggag

SEQ ID NO: 290337 - DNA, 20 bp, synthetic construct
  source 1..20: mol_type = other DNA
cccacaaagtgtccaaggga

SEQ ID NO: 290338 - DNA, 20 bp, synthetic construct
  source 1..20: mol_type = other DNA
tcccacaaagtgtccaaggg

SEQ ID NO: 290339 - DNA, 20 bp, synthetic construct
  source 1..20: mol_type = other DNA
atcccacaaagtgtccaagg

SEQ ID NO: 290340 - DNA, 20 bp, synthetic construct
  source 1..20: mol_type = other DNA
aatcccacaaagtgtccaag

SEQ ID NO: 290341 - DNA, 20 bp, synthetic construct
  source 1..20: mol_type = other DNA
aaatcccacaaagtgtccaa

SEQ ID NO: 290342 - DNA, 20 bp, synthetic construct
  source 1..20: mol_type = other DNA
taaatcccacaaagtgtcca

SEQ ID NO: 290343 - DNA, 20 bp, synthetic construct
  source 1..20: mol_type = other DNA
ctaaatcccacaaagtgtcc

SEQ ID NO: 290344 - DNA, 20 bp, synthetic construct
  source 1..20: mol_type = other DNA
actaaatcccacaaagtgtc

SEQ ID NO: 290345 - DNA, 20 bp, synthetic construct
  source 1..20: mol_type = other DNA
gactaaatcccacaaagtgt

SEQ ID NO: 290346 - DNA, 20 bp, synthetic construct
  source 1..20: mol_type = other DNA
agactaaatcccacaaagtg

SEQ ID NO: 290347 - DNA, 20 bp, synthetic construct
  source 1..20: mol_type = other DNA
gagactaaatcccacaaagt

SEQ ID NO: 290348 - DNA, 20 bp, synthetic construct
  source 1..20: mol_type = other DNA
ggagactaaatcccacaaag

SEQ ID NO: 290349 - DNA, 20 bp, synthetic construct
  source 1..20: mol_type = other DNA
gggagactaaatcccacaaa

SEQ ID NO: 290350 - DNA, 20 bp, synthetic construct
  source 1..20: mol_type = other DNA
agggagactaaatcccacaa

SEQ ID NO: 290351 - DNA, 20 bp, synthetic construct
  source 1..20: mol_type = other DNA
cagggagactaaatcccaca

SEQ ID NO: 290352 - DNA, 20 bp, synthetic construct
  source 1..20: mol_type = other DNA
acagggagactaaatcccac

SEQ ID NO: 290353 - DNA, 20 bp, synthetic construct
  source 1..20: mol_type = other DNA
cacagggagactaaatccca

SEQ ID NO: 290354 - DNA, 20 bp, synthetic construct
  source 1..20: mol_type = other DNA
ccacagggagactaaatccc

SEQ ID NO: 290355 - DNA, 20 bp, synthetic construct
  source 1..20: mol_type = other DNA
tccacagggagactaaatcc

SEQ ID NO: 290356 - DNA, 20 bp, synthetic construct
  source 1..20: mol_type = other DNA
ttccacagggagactaaatc

SEQ ID NO: 290357 - DNA, 20 bp, synthetic construct
  source 1..20: mol_type = other DNA
tttccacagggagactaaat

SEQ ID NO: 290358 - DNA, 20 bp, synthetic construct
  source 1..20: mol_type = other DNA
ctttccacagggagactaaa

SEQ ID NO: 290359 - DNA, 20 bp, synthetic construct
  source 1..20: mol_type = other DNA
actttccacagggagactaa

SEQ ID NO: 290360 - DNA, 20 bp, synthetic construct
  source 1..20: mol_type = other DNA
tactttccacagggagacta

SEQ ID NO: 290361 - DNA, 20 bp, synthetic construct
  source 1..20: mol_type = other DNA
atactttccacagggagact

SEQ ID NO: 290362 - DNA, 20 bp, synthetic construct
  source 1..20: mol_type = other DNA
aatactttccacagggagac

SEQ ID NO: 290363 - DNA, 20 bp, synthetic construct
  source 1..20: mol_type = other DNA
gaatactttccacagggaga

SEQ ID NO: 290364 - DNA, 20 bp, synthetic construct
  source 1..20: mol_type = other DNA
ggaatactttccacagggag

SEQ ID NO: 290365 - DNA, 20 bp, synthetic construct
  source 1..20: mol_type = other DNA
tggaatactttccacaggga

SEQ ID NO: 290366 - DNA, 20 bp, synthetic construct
  source 1..20: mol_type = other DNA
gtggaatactttccacaggg

SEQ ID NO: 290367 - DNA, 20 bp, synthetic construct
  source 1..20: mol_type = other DNA
tgtggaatactttccacagg

SEQ ID NO: 290368 - DNA, 20 bp, synthetic construct
  source 1..20: mol_type = other DNA
ttgtggaatactttccacag

SEQ ID NO: 290369 - DNA, 20 bp, synthetic construct
  source 1..20: mol_type = other DNA
cttgtggaatactttccaca

SEQ ID NO: 290370 - DNA, 20 bp, synthetic construct
  source 1..20: mol_type = other DNA
acttgtggaatactttccac

SEQ ID NO: 290371 - DNA, 20 bp, synthetic construct
  source 1..20: mol_type = other DNA
cacttgtggaatactttcca

SEQ ID NO: 290372 - DNA, 20 bp, synthetic construct
  source 1..20: mol_type = other DNA
ccacttgtggaatactttcc

SEQ ID NO: 290373 - DNA, 20 bp, synthetic construct
  source 1..20: mol_type = other DNA
accacttgtggaatactttc

SEQ ID NO: 290374 - DNA, 20 bp, synthetic construct
  source 1..20: mol_type = other DNA
caccacttgtggaatacttt

SEQ ID NO: 290375 - DNA, 20 bp, synthetic construct
  source 1..20: mol_type = other DNA
gcaccacttgtggaatactt

SEQ ID NO: 290376 - DNA, 20 bp, synthetic construct
  source 1..20: mol_type = other DNA
ggcaccacttgtggaatact

SEQ ID NO: 290377 - DNA, 20 bp, synthetic construct
  source 1..20: mol_type = other DNA
tggcaccacttgtggaatac

SEQ ID NO: 290378 - DNA, 20 bp, synthetic construct
  source 1..20: mol_type = other DNA
gtggcaccacttgtggaata

SEQ ID NO: 290379 - DNA, 20 bp, synthetic construct
  source 1..20: mol_type = other DNA
ggtggcaccacttgtggaat

SEQ ID NO: 290380 - DNA, 20 bp, synthetic construct
  source 1..20: mol_type = other DNA
tggtggcaccacttgtggaa

SEQ ID NO: 290381 - DNA, 20 bp, synthetic construct
  source 1..20: mol_type = other DNA
gtggtggcaccacttgtgga

SEQ ID NO: 290382 - DNA, 20 bp, synthetic construct
  source 1..20: mol_type = other DNA
ggtggtggcaccacttgtgg

SEQ ID NO: 290383 - DNA, 20 bp, synthetic construct
  source 1..20: mol_type = other DNA
gggtggtggcaccacttgtg

SEQ ID NO: 290384 - DNA, 20 bp, synthetic construct
  source 1..20: mol_type = other DNA
ggggtggtggcaccacttgt

SEQ ID NO: 290385 - DNA, 20 bp, synthetic construct
  source 1..20: mol_type = other DNA
tggggtggtggcaccacttg

SEQ ID NO: 290386 - DNA, 20 bp, synthetic construct
  source 1..20: mol_type = other DNA
ctggggtggtggcaccactt

SEQ ID NO: 290387 - DNA, 20 bp, synthetic construct
  source 1..20: mol_type = other DNA
gctggggtggtggcaccact

SEQ ID NO: 290388 - DNA, 20 bp, synthetic construct
  source 1..20: mol_type = other DNA
agctggggtggtggcaccac

SEQ ID NO: 290389 - DNA, 20 bp, synthetic construct
  source 1..20: mol_type = other DNA
cagctggggtggtggcacca

SEQ ID NO: 290390 - DNA, 20 bp, synthetic construct
  source 1..20: mol_type = other DNA
acagctggggtggtggcacc

SEQ ID NO: 290391 - DNA, 20 bp, synthetic construct
  source 1..20: mol_type = other DNA
cacagctggggtggtggcac

SEQ ID NO: 290392 - DNA, 20 bp, synthetic construct
  source 1..20: mol_type = other DNA
tcacagctggggtggtggca

SEQ ID NO: 290393 - DNA, 20 bp, synthetic construct
  source 1..20: mol_type = other DNA
ctcacagctggggtggtggc

SEQ ID NO: 290394 - DNA, 20 bp, synthetic construct
  source 1..20: mol_type = other DNA
tctcacagctggggtggtgg

SEQ ID NO: 290395 - DNA, 20 bp, synthetic construct
  source 1..20: mol_type = other DNA
ctctcacagctggggtggtg

SEQ ID NO: 290396 - DNA, 20 bp, synthetic construct
  source 1..20: mol_type = other DNA
gctctcacagctggggtggt

SEQ ID NO: 290397 - DNA, 20 bp, synthetic construct
  source 1..20: mol_type = other DNA
tgctctcacagctggggtgg

SEQ ID NO: 290398 - DNA, 20 bp, synthetic construct
  source 1..20: mol_type = other DNA
ctgctctcacagctggggtg

SEQ ID NO: 290399 - DNA, 20 bp, synthetic construct
  source 1..20: mol_type = other DNA
gctgctctcacagctggggt

SEQ ID NO: 290400 - DNA, 20 bp, synthetic construct
  source 1..20: mol_type = other DNA
agctgctctcacagctgggg

SEQ ID NO: 290401 - DNA, 20 bp, synthetic construct
  source 1..20: mol_type = other DNA
cagctgctctcacagctggg

SEQ ID NO: 290402 - DNA, 20 bp, synthetic construct
  source 1..20: mol_type = other DNA
ccagctgctctcacagctgg

SEQ ID NO: 290403 - DNA, 20 bp, synthetic construct
  source 1..20: mol_type = other DNA
cccagctgctctcacagctg

SEQ ID NO: 290404 - DNA, 20 bp, synthetic construct
  source 1..20: mol_type = other DNA
tcccagctgctctcacagct

SEQ ID NO: 290405 - DNA, 20 bp, synthetic construct
  source 1..20: mol_type = other DNA
ctcccagctgctctcacagc

SEQ ID NO: 290406 - DNA, 20 bp, synthetic construct
  source 1..20: mol_type = other DNA
gctcccagctgctctcacag

SEQ ID NO: 290407 - DNA, 20 bp, synthetic construct
  source 1..20: mol_type = other DNA
agctcccagctgctctcaca

SEQ ID NO: 290408 - DNA, 20 bp, synthetic construct
  source 1..20: mol_type = other DNA
cagctcccagctgctctcac

SEQ ID NO: 290409 - DNA, 20 bp, synthetic construct
  source 1..20: mol_type = other DNA
gcagctcccagctgctctca

SEQ ID NO: 290410 - DNA, 20 bp, synthetic construct
  source 1..20: mol_type = other DNA
agcagctcccagctgctctc

SEQ ID NO: 290411 - DNA, 20 bp, synthetic construct
  source 1..20: mol_type = other DNA
aagcagctcccagctgctct

SEQ ID NO: 290412 - DNA, 20 bp, synthetic construct
  source 1..20: mol_type = other DNA
aaagcagctcccagctgctc

SEQ ID NO: 290413 - DNA, 20 bp, synthetic construct
  source 1..20: mol_type = other DNA
aaaagcagctcccagctgct

SEQ ID NO: 290414 - DNA, 20 bp, synthetic construct
  source 1..20: mol_type = other DNA
caaaagcagctcccagctgc

SEQ ID NO: 290415 - DNA, 20 bp, synthetic construct
  source 1..20: mol_type = other DNA
acaaaagcagctcccagctg

SEQ ID NO: 290416 - DNA, 20 bp, synthetic construct
  source 1..20: mol_type = other DNA
gacaaaagcagctcccagct

SEQ ID NO: 290417 - DNA, 20 bp, synthetic construct
  source 1..20: mol_type = other DNA
tgacaaaagcagctcccagc

SEQ ID NO: 290418 - DNA, 20 bp, synthetic construct
  source 1..20: mol_type = other DNA
atgacaaaagcagctcccag

SEQ ID NO: 290419 - DNA, 20 bp, synthetic construct
  source 1..20: mol_type = other DNA
gatgacaaaagcagctccca

SEQ ID NO: 290420 - DNA, 20 bp, synthetic construct
  source 1..20: mol_type = other DNA
agatgacaaaagcagctccc

SEQ ID NO: 290421 - DNA, 20 bp, synthetic construct
  source 1..20: mol_type = other DNA
aagatgacaaaagcagctcc

SEQ ID NO: 290422 - DNA, 20 bp, synthetic construct
  source 1..20: mol_type = other DNA
aaagatgacaaaagcagctc

SEQ ID NO: 290423 - DNA, 20 bp, synthetic construct
  source 1..20: mol_type = other DNA
gaaagatgacaaaagcagct

SEQ ID NO: 290424 - DNA, 20 bp, synthetic construct
  source 1..20: mol_type = other DNA
ggaaagatgacaaaagcagc

SEQ ID NO: 290425 - DNA, 20 bp, synthetic construct
  source 1..20: mol_type = other DNA
gggaaagatgacaaaagcag

SEQ ID NO: 290426 - DNA, 20 bp, synthetic construct
  source 1..20: mol_type = other DNA
agggaaagatgacaaaagca

SEQ ID NO: 290427 - DNA, 20 bp, synthetic construct
  source 1..20: mol_type = other DNA
cagggaaagatgacaaaagc

SEQ ID NO: 290428 - DNA, 20 bp, synthetic construct
  source 1..20: mol_type = other DNA
ccagggaaagatgacaaaag

SEQ ID NO: 290429 - DNA, 20 bp, synthetic construct
  source 1..20: mol_type = other DNA
tccagggaaagatgacaaaa

SEQ ID NO: 290430 - DNA, 20 bp, synthetic construct
  source 1..20: mol_type = other DNA
ttccagggaaagatgacaaa

SEQ ID NO: 290431 - DNA, 20 bp, synthetic construct
  source 1..20: mol_type = other DNA
tttccagggaaagatgacaa

SEQ ID NO: 290432 - DNA, 20 bp, synthetic construct
  source 1..20: mol_type = other DNA
ctttccagggaaagatgaca

SEQ ID NO: 290433 - DNA, 20 bp, synthetic construct
  source 1..20: mol_type = other DNA
actttccagggaaagatgac

SEQ ID NO: 290434 - DNA, 20 bp, synthetic construct
  source 1..20: mol_type = other DNA
gactttccagggaaagatga

SEQ ID NO: 290435 - DNA, 20 bp, synthetic construct
  source 1..20: mol_type = other DNA
ggactttccagggaaagatg

SEQ ID NO: 290436 - DNA, 20 bp, synthetic construct
  source 1..20: mol_type = other DNA
aggactttccagggaaagat

SEQ ID NO: 290437 - DNA, 20 bp, synthetic construct
  source 1..20: mol_type = other DNA
caggactttccagggaaaga

SEQ ID NO: 290438 - DNA, 20 bp, synthetic construct
  source 1..20: mol_type = other DNA
acaggactttccagggaaag

SEQ ID NO: 290439 - DNA, 20 bp, synthetic construct
  source 1..20: mol_type = other DNA
cacaggactttccagggaaa

SEQ ID NO: 290440 - DNA, 20 bp, synthetic construct
  source 1..20: mol_type = other DNA
ccacaggactttccagggaa

SEQ ID NO: 290441 - DNA, 20 bp, synthetic construct
  source 1..20: mol_type = other DNA
cccacaggactttccaggga

SEQ ID NO: 290442 - DNA, 20 bp, synthetic construct
  source 1..20: mol_type = other DNA
gcccacaggactttccaggg

SEQ ID NO: 290443 - DNA, 20 bp, synthetic construct
  source 1..20: mol_type = other DNA
agcccacaggactttccagg

SEQ ID NO: 290444 - DNA, 20 bp, synthetic construct
  source 1..20: mol_type = other DNA
cagcccacaggactttccag

SEQ ID NO: 290445 - DNA, 20 bp, synthetic construct
  source 1..20: mol_type = other DNA
acagcccacaggactttcca

SEQ ID NO: 290446 - DNA, 20 bp, synthetic construct
  source 1..20: mol_type = other DNA
gacagcccacaggactttcc

SEQ ID NO: 290447 - DNA, 20 bp, synthetic construct
  source 1..20: mol_type = other DNA
agacagcccacaggactttc

SEQ ID NO: 290448 - DNA, 20 bp, synthetic construct
  source 1..20: mol_type = other DNA
gagacagcccacaggacttt

SEQ ID NO: 290449 - DNA, 20 bp, synthetic construct
  source 1..20: mol_type = other DNA
agagacagcccacaggactt

SEQ ID NO: 290450 - DNA, 20 bp, synthetic construct
  source 1..20: mol_type = other DNA
aagagacagcccacaggact

SEQ ID NO: 290451 - DNA, 20 bp, synthetic construct
  source 1..20: mol_type = other DNA
gaagagacagcccacaggac

SEQ ID NO: 290452 - DNA, 20 bp, synthetic construct
  source 1..20: mol_type = other DNA
ggaagagacagcccacagga

SEQ ID NO: 290453 - DNA, 20 bp, synthetic construct
  source 1..20: mol_type = other DNA
aggaagagacagcccacagg

SEQ ID NO: 290454 - DNA, 20 bp, synthetic construct
  source 1..20: mol_type = other DNA
gaggaagagacagcccacag

SEQ ID NO: 290455 - DNA, 20 bp, synthetic construct
  source 1..20: mol_type = other DNA
tgaggaagagacagcccaca

SEQ ID NO: 290456 - DNA, 20 bp, synthetic construct
  source 1..20: mol_type = other DNA
atgaggaagagacagcccac

SEQ ID NO: 290457 - DNA, 20 bp, synthetic construct
  source 1..20: mol_type = other DNA
catgaggaagagacagccca

SEQ ID NO: 290458 - DNA, 20 bp, synthetic construct
  source 1..20: mol_type = other DNA
gcatgaggaagagacagccc

SEQ ID NO: 290459 - DNA, 20 bp, synthetic construct
  source 1..20: mol_type = other DNA
ggcatgaggaagagacagcc

SEQ ID NO: 290460 - DNA, 20 bp, synthetic construct
  source 1..20: mol_type = other DNA
aggcatgaggaagagacagc

SEQ ID NO: 290461 - DNA, 20 bp, synthetic construct
  source 1..20: mol_type = other DNA
aaggcatgaggaagagacag

SEQ ID NO: 290462 - DNA, 20 bp, synthetic construct
  source 1..20: mol_type = other DNA
caaggcatgaggaagagaca

SEQ ID NO: 290463 - DNA, 20 bp, synthetic construct
  source 1..20: mol_type = other DNA
acaaggcatgaggaagagac

SEQ ID NO: 290464 - DNA, 20 bp, synthetic construct
  source 1..20: mol_type = other DNA
gacaaggcatgaggaagaga

SEQ ID NO: 290465 - DNA, 20 bp, synthetic construct
  source 1..20: mol_type = other DNA
ggacaaggcatgaggaagag

SEQ ID NO: 290466 - DNA, 20 bp, synthetic construct
  source 1..20: mol_type = other DNA
gggacaaggcatgaggaaga

SEQ ID NO: 290467 - DNA, 20 bp, synthetic construct
  source 1..20: mol_type = other DNA
tgggacaaggcatgaggaag

SEQ ID NO: 290468 - DNA, 20 bp, synthetic construct
  source 1..20: mol_type = other DNA
atgggacaaggcatgaggaa

SEQ ID NO: 290469 - DNA, 20 bp, synthetic construct
  source 1..20: mol_type = other DNA
catgggacaaggcatgagga

SEQ ID NO: 290470 - DNA, 20 bp, synthetic construct
  source 1..20: mol_type = other DNA
gcatgggacaaggcatgagg

SEQ ID NO: 290471 - DNA, 20 bp, synthetic construct
  source 1..20: mol_type = other DNA
agcatgggacaaggcatgag

SEQ ID NO: 290472 - DNA, 20 bp, synthetic construct
  source 1..20: mol_type = other DNA
aagcatgggacaaggcatga

SEQ ID NO: 290473 - DNA, 20 bp, synthetic construct
  source 1..20: mol_type = other DNA
caagcatgggacaaggcatg

SEQ ID NO: 290474 - DNA, 20 bp, synthetic construct
  source 1..20: mol_type = other DNA
ccaagcatgggacaaggcat

SEQ ID NO: 290475 - DNA, 20 bp, synthetic construct
  source 1..20: mol_type = other DNA
cccaagcatgggacaaggca

SEQ ID NO: 290476 - DNA, 20 bp, synthetic construct
  source 1..20: mol_type = other DNA
gcccaagcatgggacaaggc

SEQ ID NO: 290477 - DNA, 20 bp, synthetic construct
  source 1..20: mol_type = other DNA
tgcccaagcatgggacaagg

SEQ ID NO: 290478 - DNA, 20 bp, synthetic construct
  source 1..20: mol_type = other DNA
atgcccaagcatgggacaag

SEQ ID NO: 290479 - DNA, 20 bp, synthetic construct
  source 1..20: mol_type = other DNA
catgcccaagcatgggacaa

SEQ ID NO: 290480 - DNA, 20 bp, synthetic construct
  source 1..20: mol_type = other DNA
ccatgcccaagcatgggaca

SEQ ID NO: 290481 - DNA, 20 bp, synthetic construct
  source 1..20: mol_type = other DNA
accatgcccaagcatgggac

SEQ ID NO: 290482 - DNA, 20 bp, synthetic construct
  source 1..20: mol_type = other DNA
caccatgcccaagcatggga

SEQ ID NO: 290483 - DNA, 20 bp, synthetic construct
  source 1..20: mol_type = other DNA
acaccatgcccaagcatggg

SEQ ID NO: 290484 - DNA, 20 bp, synthetic construct
  source 1..20: mol_type = other DNA
gacaccatgcccaagcatgg

SEQ ID NO: 290485 - DNA, 20 bp, synthetic construct
  source 1..20: mol_type = other DNA
tgacaccatgcccaagcatg

SEQ ID NO: 290486 - DNA, 20 bp, synthetic construct
  source 1..20: mol_type = other DNA
ttgacaccatgcccaagcat

SEQ ID NO: 290487 - DNA, 20 bp, synthetic construct
  source 1..20: mol_type = other DNA
cttgacaccatgcccaagca

SEQ ID NO: 290488 - DNA, 20 bp, synthetic construct
  source 1..20: mol_type = other DNA
gcttgacaccatgcccaagc

SEQ ID NO: 290489 - DNA, 20 bp, synthetic construct
  source 1..20: mol_type = other DNA
cgcttgacaccatgcccaag

SEQ ID NO: 290490 - DNA, 20 bp, synthetic construct
  source 1..20: mol_type = other DNA
acgcttgacaccatgcccaa

SEQ ID NO: 290491 - DNA, 20 bp, synthetic construct
  source 1..20: mol_type = other DNA
gacgcttgacaccatgccca

SEQ ID NO: 290492 - DNA, 20 bp, synthetic construct
  source 1..20: mol_type = other DNA
tgacgcttgacaccatgccc

SEQ ID NO: 290493 - DNA, 20 bp, synthetic construct
  source 1..20: mol_type = other DNA
ctgacgcttgacaccatgcc

SEQ ID NO: 290494 - DNA, 20 bp, synthetic construct
  source 1..20: mol_type = other DNA
cctgacgcttgacaccatgc

SEQ ID NO: 290495 - DNA, 20 bp, synthetic construct
  source 1..20: mol_type = other DNA
tcctgacgcttgacaccatg

SEQ ID NO: 290496 - DNA, 20 bp, synthetic construct
  source 1..20: mol_type = other DNA
ctcctgacgcttgacaccat

SEQ ID NO: 290497 - DNA, 20 bp, synthetic construct
  source 1..20: mol_type = other DNA
cctcctgacgcttgacacca

SEQ ID NO: 290498 - DNA, 20 bp, synthetic construct
  source 1..20: mol_type = other DNA
ccctcctgacgcttgacacc

SEQ ID NO: 290499 - DNA, 20 bp, synthetic construct
  source 1..20: mol_type = other DNA
tccctcctgacgcttgacac

SEQ ID NO: 290500 - DNA, 20 bp, synthetic construct
  source 1..20: mol_type = other DNA
ctccctcctgacgcttgaca

SEQ ID NO: 290501 - DNA, 20 bp, synthetic construct
  source 1..20: mol_type = other DNA
tctccctcctgacgcttgac

SEQ ID NO: 290502 - DNA, 20 bp, synthetic construct
  source 1..20: mol_type = other DNA
ttctccctcctgacgcttga

SEQ ID NO: 290503 - DNA, 20 bp, synthetic construct
  source 1..20: mol_type = other DNA
tttctccctcctgacgcttg

SEQ ID NO: 290504 - DNA, 20 bp, synthetic construct
  source 1..20: mol_type = other DNA
ctttctccctcctgacgctt

SEQ ID NO: 290505 - DNA, 20 bp, synthetic construct
  source 1..20: mol_type = other DNA
cctttctccctcctgacgct

SEQ ID NO: 290506 - DNA, 20 bp, synthetic construct
  source 1..20: mol_type = other DNA
ccctttctccctcctgacgc

SEQ ID NO: 290507 - DNA, 20 bp, synthetic construct
  source 1..20: mol_type = other DNA
accctttctccctcctgacg

SEQ ID NO: 290508 - DNA, 20 bp, synthetic construct
  source 1..20: mol_type = other DNA
gaccctttctccctcctgac

SEQ ID NO: 290509 - DNA, 20 bp, synthetic construct
  source 1..20: mol_type = other DNA
ggaccctttctccctcctga

SEQ ID NO: 290510 - DNA, 20 bp, synthetic construct
  source 1..20: mol_type = other DNA
aggaccctttctccctcctg

SEQ ID NO: 290511 - DNA, 20 bp, synthetic construct
  source 1..20: mol_type = other DNA
aaggaccctttctccctcct

SEQ ID NO: 290512 - DNA, 20 bp, synthetic construct
  source 1..20: mol_type = other DNA
taaggaccctttctccctcc

SEQ ID NO: 290513 - DNA, 20 bp, synthetic construct
  source 1..20: mol_type = other DNA
ataaggaccctttctccctc

SEQ ID NO: 290514 - DNA, 20 bp, synthetic construct
  source 1..20: mol_type = other DNA
aataaggaccctttctccct

SEQ ID NO: 290515 - DNA, 20 bp, synthetic construct
  source 1..20: mol_type = other DNA
aaataaggaccctttctccc

SEQ ID NO: 290516 - DNA, 20 bp, synthetic construct
  source 1..20: mol_type = other DNA
taaataaggaccctttctcc

SEQ ID NO: 290517 - DNA, 20 bp, synthetic construct
  source 1..20: mol_type = other DNA
ataaataaggaccctttctc

SEQ ID NO: 290518 - DNA, 20 bp, synthetic construct
  source 1..20: mol_type = other DNA
aataaataaggaccctttct

SEQ ID NO: 290519 - DNA, 20 bp, synthetic construct
  source 1..20: mol_type = other DNA
aaataaataaggaccctttc

SEQ ID NO: 290520 - DNA, 20 bp, synthetic construct
  source 1..20: mol_type = other DNA
taaataaataaggacccttt

SEQ ID NO: 290521 - DNA, 20 bp, synthetic construct
  source 1..20: mol_type = other DNA
ataaataaataaggaccctt

SEQ ID NO: 290522 - DNA, 20 bp, synthetic construct
  source 1..20: mol_type = other DNA
aataaataaataaggaccct

SEQ ID NO: 290523 - DNA, 20 bp, synthetic construct
  source 1..20: mol_type = other DNA
aaataaataaataaggaccc

SEQ ID NO: 290524 - DNA, 20 bp, synthetic construct
  source 1..20: mol_type = other DNA
taaataaataaataaggacc

SEQ ID NO: 290525 - DNA, 20 bp, synthetic construct
  source 1..20: mol_type = other DNA
ctaaataaataaataaggac

SEQ ID NO: 290526 - DNA, 20 bp, synthetic construct
  source 1..20: mol_type = other DNA
tctaaataaataaataagga

SEQ ID NO: 290527 - DNA, 20 bp, synthetic construct
  source 1..20: mol_type = other DNA
ctctaaataaataaataagg

SEQ ID NO: 290528 - DNA, 20 bp, synthetic construct
  source 1..20: mol_type = other DNA
tctctaaataaataaataag

SEQ ID NO: 290529 - DNA, 20 bp, synthetic construct
  source 1..20: mol_type = other DNA
ctctctaaataaataaataa

SEQ ID NO: 290530 - DNA, 20 bp, synthetic construct
  source 1..20: mol_type = other DNA
cctctctaaataaataaata

SEQ ID NO: 290531 - DNA, 20 bp, synthetic construct
  source 1..20: mol_type = other DNA
ccctctctaaataaataaat

SEQ ID NO: 290532 - DNA, 20 bp, synthetic construct
  source 1..20: mol_type = other DNA
tccctctctaaataaataaa

SEQ ID NO: 290533 - DNA, 20 bp, synthetic construct
  source 1..20: mol_type = other DNA
gtccctctctaaataaataa

SEQ ID NO: 290534 - DNA, 20 bp, synthetic construct
  source 1..20: mol_type = other DNA
ggtccctctctaaataaata

SEQ ID NO: 290535 - DNA, 20 bp, synthetic construct
  source 1..20: mol_type = other DNA
gggtccctctctaaataaat

SEQ ID NO: 290536 - DNA, 20 bp, synthetic construct
  source 1..20: mol_type = other DNA
agggtccctctctaaataaa

SEQ ID NO: 290537 - DNA, 20 bp, synthetic construct
  source 1..20: mol_type = other DNA
aagggtccctctctaaataa

SEQ ID NO: 290538 - DNA, 20 bp, synthetic construct
  source 1..20: mol_type = other DNA
gaagggtccctctctaaata

SEQ ID NO: 290539 - DNA, 20 bp, synthetic construct
  source 1..20: mol_type = other DNA
agaagggtccctctctaaat

SEQ ID NO: 290540 - DNA, 20 bp, synthetic construct
  source 1..20: mol_type = other DNA
aagaagggtccctctctaaa

SEQ ID NO: 290541 - DNA, 20 bp, synthetic construct
  source 1..20: mol_type = other DNA
gaagaagggtccctctctaa

SEQ ID NO: 290542 - DNA, 20 bp, synthetic construct
  source 1..20: mol_type = other DNA
agaagaagggtccctctcta

SEQ ID NO: 290543 - DNA, 20 bp, synthetic construct
  source 1..20: mol_type = other DNA
cagaagaagggtccctctct

SEQ ID NO: 290544 - DNA, 20 bp, synthetic construct
  source 1..20: mol_type = other DNA
acagaagaagggtccctctc

SEQ ID NO: 290545 - DNA, 20 bp, synthetic construct
  source 1..20: mol_type = other DNA
aacagaagaagggtccctct

SEQ ID NO: 290546 - DNA, 20 bp, synthetic construct
  source 1..20: mol_type = other DNA
gaacagaagaagggtccctc

SEQ ID NO: 290547 - DNA, 20 bp, synthetic construct
  source 1..20: mol_type = other DNA
ggaacagaagaagggtccct

SEQ ID NO: 290548 - DNA, 20 bp, synthetic construct
  source 1..20: mol_type = other DNA
gggaacagaagaagggtccc

SEQ ID NO: 290549 - DNA, 20 bp, synthetic construct
  source 1..20: mol_type = other DNA
tgggaacagaagaagggtcc

SEQ ID NO: 290550 - DNA, 20 bp, synthetic construct
  source 1..20: mol_type = other DNA
ctgggaacagaagaagggtc

SEQ ID NO: 290551 - DNA, 20 bp, synthetic construct
  source 1..20: mol_type = other DNA
cctgggaacagaagaagggt

SEQ ID NO: 290552 - DNA, 20 bp, synthetic construct
  source 1..20: mol_type = other DNA
gcctgggaacagaagaaggg

SEQ ID NO: 290553 - DNA, 20 bp, synthetic construct
  source 1..20: mol_type = other DNA
agcctgggaacagaagaagg

SEQ ID NO: 290554 - DNA, 20 bp, synthetic construct
  source 1..20: mol_type = other DNA
cagcctgggaacagaagaag

SEQ ID NO: 290555 - DNA, 20 bp, synthetic construct
  source 1..20: mol_type = other DNA
ccagcctgggaacagaagaa

SEQ ID NO: 290556 - DNA, 20 bp, synthetic construct
  source 1..20: mol_type = other DNA
tccagcctgggaacagaaga

SEQ ID NO: 290557 - DNA, 20 bp, synthetic construct
  source 1..20: mol_type = other DNA
ctccagcctgggaacagaag

SEQ ID NO: 290558 - DNA, 20 bp, synthetic construct
  source 1..20: mol_type = other DNA
actccagcctgggaacagaa

SEQ ID NO: 290559 - DNA, 20 bp, synthetic construct
  source 1..20: mol_type = other DNA
cactccagcctgggaacaga

SEQ ID NO: 290560 - DNA, 20 bp, synthetic construct
  source 1..20: mol_type = other DNA
gcactccagcctgggaacag

SEQ ID NO: 290561 - DNA, 20 bp, synthetic construct
  source 1..20: mol_type = other DNA
tgcactccagcctgggaaca

SEQ ID NO: 290562 - DNA, 20 bp, synthetic construct
  source 1..20: mol_type = other DNA
ctgcactccagcctgggaac

SEQ ID NO: 290563 - DNA, 20 bp, synthetic construct
  source 1..20: mol_type = other DNA
actgcactccagcctgggaa

SEQ ID NO: 290564 - DNA, 20 bp, synthetic construct
  source 1..20: mol_type = other DNA
cactgcactccagcctggga

SEQ ID NO: 290565 - DNA, 20 bp, synthetic construct
  source 1..20: mol_type = other DNA
ccactgcactccagcctggg

SEQ ID NO: 290566 - DNA, 20 bp, synthetic construct
  source 1..20: mol_type = other DNA
accactgcactccagcctgg

SEQ ID NO: 290567 - DNA, 20 bp, synthetic construct
  source 1..20: mol_type = other DNA
caccactgcactccagcctg

SEQ ID NO: 290568 - DNA, 20 bp, synthetic construct
  source 1..20: mol_type = other DNA
gcaccactgcactccagcct

SEQ ID NO: 290569 - DNA, 20 bp, synthetic construct
  source 1..20: mol_type = other DNA
cgcaccactgcactccagcc

SEQ ID NO: 290570 - DNA, 20 bp, synthetic construct
  source 1..20: mol_type = other DNA
tcgcaccactgcactccagc

SEQ ID NO: 290571 - DNA, 20 bp, synthetic construct
  source 1..20: mol_type = other DNA
atcgcaccactgcactccag

SEQ ID NO: 290572 - DNA, 20 bp, synthetic construct
  source 1..20: mol_type = other DNA
gatcgcaccactgcactcca

SEQ ID NO: 290573 - DNA, 20 bp, synthetic construct
  source 1..20: mol_type = other DNA
agatcgcaccactgcactcc

SEQ ID NO: 290574 - DNA, 20 bp, synthetic construct
  source 1..20: mol_type = other DNA
gagatcgcaccactgcactc

SEQ ID NO: 290575 - DNA, 20 bp, synthetic construct
  source 1..20: mol_type = other DNA
cgagatcgcaccactgcact

SEQ ID NO: 290576 - DNA, 20 bp, synthetic construct
  source 1..20: mol_type = other DNA
ccgagatcgcaccactgcac

SEQ ID NO: 290577 - DNA, 20 bp, synthetic construct
  source 1..20: mol_type = other DNA
gccgagatcgcaccactgca

SEQ ID NO: 290578 - DNA, 20 bp, synthetic construct
  source 1..20: mol_type = other DNA
agccgagatcgcaccactgc

SEQ ID NO: 290579 - DNA, 20 bp, synthetic construct
  source 1..20: mol_type = other DNA
gagccgagatcgcaccactg

SEQ ID NO: 290580 - DNA, 20 bp, synthetic construct
  source 1..20: mol_type = other DNA
tgagccgagatcgcaccact

SEQ ID NO: 290581 - DNA, 20 bp, synthetic construct
  source 1..20: mol_type = other DNA
gtgagccgagatcgcaccac

SEQ ID NO: 290582 - DNA, 20 bp, synthetic construct
  source 1..20: mol_type = other DNA
agtgagccgagatcgcacca

SEQ ID NO: 290583 - DNA, 20 bp, synthetic construct
  source 1..20: mol_type = other DNA
cagtgagccgagatcgcacc

SEQ ID NO: 290584 - DNA, 20 bp, synthetic construct
  source 1..20: mol_type = other DNA
gcagtgagccgagatcgcac

SEQ ID NO: 290585 - DNA, 20 bp, synthetic construct
  source 1..20: mol_type = other DNA
tgcagtgagccgagatcgca

SEQ ID NO: 290586 - DNA, 20 bp, synthetic construct
  source 1..20: mol_type = other DNA
ttgcagtgagccgagatcgc

SEQ ID NO: 290587 - DNA, 20 bp, synthetic construct
  source 1..20: mol_type = other DNA
gttgcagtgagccgagatcg

SEQ ID NO: 290588 - DNA, 20 bp, synthetic construct
  source 1..20: mol_type = other DNA
ggttgcagtgagccgagatc

SEQ ID NO: 290589 - DNA, 20 bp, synthetic construct
  source 1..20: mol_type = other DNA
aggttgcagtgagccgagat

SEQ ID NO: 290590 - DNA, 20 bp, synthetic construct
  source 1..20: mol_type = other DNA
gaggttgcagtgagccgaga

SEQ ID NO: 290591 - DNA, 20 bp, synthetic construct
  source 1..20: mol_type = other DNA
ggaggttgcagtgagccgag

SEQ ID NO: 290592 - DNA, 20 bp, synthetic construct
  source 1..20: mol_type = other DNA
cggaggttgcagtgagccga

SEQ ID NO: 290593 - DNA, 20 bp, synthetic construct
  source 1..20: mol_type = other DNA
gcggaggttgcagtgagccg

SEQ ID NO: 290594 - DNA, 20 bp, synthetic construct
  source 1..20: mol_type = other DNA
ggcggaggttgcagtgagcc

SEQ ID NO: 290595 - DNA, 20 bp, synthetic construct
  source 1..20: mol_type = other DNA
aggcggaggttgcagtgagc

SEQ ID NO: 290596 - DNA, 20 bp, synthetic construct
  source 1..20: mol_type = other DNA
gaggcggaggttgcagtgag

SEQ ID NO: 290597 - DNA, 20 bp, synthetic construct
  source 1..20: mol_type = other DNA
ggaggcggaggttgcagtga

SEQ ID NO: 290598 - DNA, 20 bp, synthetic construct
  source 1..20: mol_type = other DNA
aggaggcggaggttgcagtg

SEQ ID NO: 290599 - DNA, 20 bp, synthetic construct
  source 1..20: mol_type = other DNA
caggaggcggaggttgcagt

SEQ ID NO: 290600 - DNA, 20 bp, synthetic construct
  source 1..20: mol_type = other DNA
ccaggaggcggaggttgcag

SEQ ID NO: 290601 - DNA, 20 bp, synthetic construct
  source 1..20: mol_type = other DNA
cccaggaggcggaggttgca

SEQ ID NO: 290602 - DNA, 20 bp, synthetic construct
  source 1..20: mol_type = other DNA
acccaggaggcggaggttgc

SEQ ID NO: 290603 - DNA, 20 bp, synthetic construct
  source 1..20: mol_type = other DNA
aacccaggaggcggaggttg

SEQ ID NO: 290604 - DNA, 20 bp, synthetic construct
  source 1..20: mol_type = other DNA
gaacccaggaggcggaggtt

SEQ ID NO: 290605 - DNA, 20 bp, synthetic construct
  source 1..20: mol_type = other DNA
tgaacccaggaggcggaggt

SEQ ID NO: 290606 - DNA, 20 bp, synthetic construct
  source 1..20: mol_type = other DNA
ttgaacccaggaggcggagg

SEQ ID NO: 290607 - DNA, 20 bp, synthetic construct
  source 1..20: mol_type = other DNA
cttgaacccaggaggcggag

SEQ ID NO: 290608 - DNA, 20 bp, synthetic construct
  source 1..20: mol_type = other DNA
acttgaacccaggaggcgga

SEQ ID NO: 290609 - DNA, 20 bp, synthetic construct
  source 1..20: mol_type = other DNA
cacttgaacccaggaggcgg

SEQ ID NO: 290610 - DNA, 20 bp, synthetic construct
  source 1..20: mol_type = other DNA
tcacttgaacccaggaggcg

SEQ ID NO: 290611 - DNA, 20 bp, synthetic construct
  source 1..20: mol_type = other DNA
atcacttgaacccaggaggc

SEQ ID NO: 290612 - DNA, 20 bp, synthetic construct
  source 1..20: mol_type = other DNA
aatcacttgaacccaggagg

SEQ ID NO: 290613 - DNA, 20 bp, synthetic construct
  source 1..20: mol_type = other DNA
gaatcacttgaacccaggag

SEQ ID NO: 290614 - DNA, 20 bp, synthetic construct
  source 1..20: mol_type = other DNA
agaatcacttgaacccagga

SEQ ID NO: 290615 - DNA, 20 bp, synthetic construct
  source 1..20: mol_type = other DNA
gagaatcacttgaacccagg

SEQ ID NO: 290616 - DNA, 20 bp, synthetic construct
  source 1..20: mol_type = other DNA
ggagaatcacttgaacccag

SEQ ID NO: 290617 - DNA, 20 bp, synthetic construct
  source 1..20: mol_type = other DNA
aggagaatcacttgaaccca

SEQ ID NO: 290618 - DNA, 20 bp, synthetic construct
  source 1..20: mol_type = other DNA
caggagaatcacttgaaccc

SEQ ID NO: 290619 - DNA, 20 bp, synthetic construct
  source 1..20: mol_type = other DNA
gcaggagaatcacttgaacc

SEQ ID NO: 290620 - DNA, 20 bp, synthetic construct
  source 1..20: mol_type = other DNA
ggcaggagaatcacttgaac

SEQ ID NO: 290621 - DNA, 20 bp, synthetic construct
  source 1..20: mol_type = other DNA
aggcaggagaatcacttgaa

SEQ ID NO: 290622 - DNA, 20 bp, synthetic construct
  source 1..20: mol_type = other DNA
gaggcaggagaatcacttga

SEQ ID NO: 290623 - DNA, 20 bp, synthetic construct
  source 1..20: mol_type = other DNA
tgaggcaggagaatcacttg

SEQ ID NO: 290624 - DNA, 20 bp, synthetic construct
  source 1..20: mol_type = other DNA
ctgaggcaggagaatcactt

SEQ ID NO: 290625 - DNA, 20 bp, synthetic construct
  source 1..20: mol_type = other DNA
gctgaggcaggagaatcact

SEQ ID NO: 290626 - DNA, 20 bp, synthetic construct
  source 1..20: mol_type = other DNA
ggctgaggcaggagaatcac

SEQ ID NO: 290627 - DNA, 20 bp, synthetic construct
  source 1..20: mol_type = other DNA
aggctgaggcaggagaatca

SEQ ID NO: 290628 - DNA, 20 bp, synthetic construct
  source 1..20: mol_type = other DNA
gaggctgaggcaggagaatc

SEQ ID NO: 290629 - DNA, 20 bp, synthetic construct
  source 1..20: mol_type = other DNA
ggaggctgaggcaggagaat

SEQ ID NO: 290630 - DNA, 20 bp, synthetic construct
  source 1..20: mol_type = other DNA
aggaggctgaggcaggagaa

SEQ ID NO: 290631 - DNA, 20 bp, synthetic construct
  source 1..20: mol_type = other DNA
caggaggctgaggcaggaga

SEQ ID NO: 290632 - DNA, 20 bp, synthetic construct
  source 1..20: mol_type = other DNA
tcaggaggctgaggcaggag

SEQ ID NO: 290633 - DNA, 20 bp, synthetic construct
  source 1..20: mol_type = other DNA
ctcaggaggctgaggcagga

SEQ ID NO: 290634 - DNA, 20 bp, synthetic construct
  source 1..20: mol_type = other DNA
actcaggaggctgaggcagg

SEQ ID NO: 290635 - DNA, 20 bp, synthetic construct
  source 1..20: mol_type = other DNA
tactcaggaggctgaggcag

SEQ ID NO: 290636 - DNA, 20 bp, synthetic construct
  source 1..20: mol_type = other DNA
ctactcaggaggctgaggca

SEQ ID NO: 290637 - DNA, 20 bp, synthetic construct
  source 1..20: mol_type = other DNA
gctactcaggaggctgaggc

SEQ ID NO: 290638 - DNA, 20 bp, synthetic construct
  source 1..20: mol_type = other DNA
agctactcaggaggctgagg

SEQ ID NO: 290639 - DNA, 20 bp, synthetic construct
  source 1..20: mol_type = other DNA
cagctactcaggaggctgag

SEQ ID NO: 290640 - DNA, 20 bp, synthetic construct
  source 1..20: mol_type = other DNA
tcagctactcaggaggctga

SEQ ID NO: 290641 - DNA, 20 bp, synthetic construct
  source 1..20: mol_type = other DNA
ctcagctactcaggaggctg

SEQ ID NO: 290642 - DNA, 20 bp, synthetic construct
  source 1..20: mol_type = other DNA
tctcagctactcaggaggct

SEQ ID NO: 290643 - DNA, 20 bp, synthetic construct
  source 1..20: mol_type = other DNA
atctcagctactcaggaggc

SEQ ID NO: 290644 - DNA, 20 bp, synthetic construct
  source 1..20: mol_type = other DNA
aatctcagctactcaggagg

SEQ ID NO: 290645 - DNA, 20 bp, synthetic construct
  source 1..20: mol_type = other DNA
taatctcagctactcaggag

SEQ ID NO: 290646 - DNA, 20 bp, synthetic construct
  source 1..20: mol_type = other DNA
gtaatctcagctactcagga

SEQ ID NO: 290647 - DNA, 20 bp, synthetic construct
  source 1..20: mol_type = other DNA
tgtaatctcagctactcagg

SEQ ID NO: 290648 - DNA, 20 bp, synthetic construct
  source 1..20: mol_type = other DNA
ctgtaatctcagctactcag

SEQ ID NO: 290649 - DNA, 20 bp, synthetic construct
  source 1..20: mol_type = other DNA
cctgtaatctcagctactca

SEQ ID NO: 290650 - DNA, 20 bp, synthetic construct
  source 1..20: mol_type = other DNA
gcctgtaatctcagctactc

SEQ ID NO: 290651 - DNA, 20 bp, synthetic construct
  source 1..20: mol_type = other DNA
tgcctgtaatctcagctact

SEQ ID NO: 290652 - DNA, 20 bp, synthetic construct
  source 1..20: mol_type = other DNA
gtgcctgtaatctcagctac

SEQ ID NO: 290653 - DNA, 20 bp, synthetic construct
  source 1..20: mol_type = other DNA
tgtgcctgtaatctcagcta

SEQ ID NO: 290654 - DNA, 20 bp, synthetic construct
  source 1..20: mol_type = other DNA
atgtgcctgtaatctcagct

SEQ ID NO: 290655 - DNA, 20 bp, synthetic construct
  source 1..20: mol_type = other DNA
catgtgcctgtaatctcagc

SEQ ID NO: 290656 - DNA, 20 bp, synthetic construct
  source 1..20: mol_type = other DNA
gcatgtgcctgtaatctcag

SEQ ID NO: 290657 - DNA, 20 bp, synthetic construct
  source 1..20: mol_type = other DNA
ggcatgtgcctgtaatctca

SEQ ID NO: 290658 - DNA, 20 bp, synthetic construct
  source 1..20: mol_type = other DNA
tggcatgtgcctgtaatctc

SEQ ID NO: 290659 - DNA, 20 bp, synthetic construct
  source 1..20: mol_type = other DNA
ttggcatgtgcctgtaatct

SEQ ID NO: 290660 - DNA, 20 bp, synthetic construct
  source 1..20: mol_type = other DNA
gttggcatgtgcctgtaatc

SEQ ID NO: 290661 - DNA, 20 bp, synthetic construct
  source 1..20: mol_type = other DNA
tgttggcatgtgcctgtaat

SEQ ID NO: 290662 - DNA, 20 bp, synthetic construct
  source 1..20: mol_type = other DNA
atgttggcatgtgcctgtaa

SEQ ID NO: 290663 - DNA, 20 bp, synthetic construct
  source 1..20: mol_type = other DNA
catgttggcatgtgcctgta

SEQ ID NO: 290664 - DNA, 20 bp, synthetic construct
  source 1..20: mol_type = other DNA
gcatgttggcatgtgcctgt

SEQ ID NO: 290665 - DNA, 20 bp, synthetic construct
  source 1..20: mol_type = other DNA
ggcatgttggcatgtgcctg

SEQ ID NO: 290666 - DNA, 20 bp, synthetic construct
  source 1..20: mol_type = other DNA
aggcatgttggcatgtgcct

SEQ ID NO: 290667 - DNA, 20 bp, synthetic construct
  source 1..20: mol_type = other DNA
caggcatgttggcatgtgcc

SEQ ID NO: 290668 - DNA, 20 bp, synthetic construct
  source 1..20: mol_type = other DNA
ccaggcatgttggcatgtgc

SEQ ID NO: 290669 - DNA, 20 bp, synthetic construct
  source 1..20: mol_type = other DNA
gccaggcatgttggcatgtg

SEQ ID NO: 290670 - DNA, 20 bp, synthetic construct
  source 1..20: mol_type = other DNA
agccaggcatgttggcatgt

SEQ ID NO: 290671 - DNA, 20 bp, synthetic construct
  source 1..20: mol_type = other DNA
tagccaggcatgttggcatg

SEQ ID NO: 290672 - DNA, 20 bp, synthetic construct
  source 1..20: mol_type = other DNA
ttagccaggcatgttggcat

SEQ ID NO: 290673 - DNA, 20 bp, synthetic construct
  source 1..20: mol_type = other DNA
attagccaggcatgttggca

SEQ ID NO: 290674 - DNA, 20 bp, synthetic construct
  source 1..20: mol_type = other DNA
aattagccaggcatgttggc

SEQ ID NO: 290675 - DNA, 20 bp, synthetic construct
  source 1..20: mol_type = other DNA
aaattagccaggcatgttgg

SEQ ID NO: 290676 - DNA, 20 bp, synthetic construct
  source 1..20: mol_type = other DNA
aaaattagccaggcatgttg

SEQ ID NO: 290677 - DNA, 20 bp, synthetic construct
  source 1..20: mol_type = other DNA
aaaaattagccaggcatgtt

SEQ ID NO: 290678 - DNA, 20 bp, synthetic construct
  source 1..20: mol_type = other DNA
aaaaaattagccaggcatgt

SEQ ID NO: 290679 - DNA, 20 bp, synthetic construct
  source 1..20: mol_type = other DNA
aaaaaaattagccaggcatg

SEQ ID NO: 290680 - DNA, 20 bp, synthetic construct
  source 1..20: mol_type = other DNA
aaaaaaaattagccaggcat

SEQ ID NO: 290681 - DNA, 20 bp, synthetic construct
  source 1..20: mol_type = other DNA
aaaaaaaaattagccaggca

SEQ ID NO: 290682 - DNA, 20 bp, synthetic construct
  source 1..20: mol_type = other DNA
aaaaaaaaaattagccaggc

SEQ ID NO: 290683 - DNA, 20 bp, synthetic construct
  source 1..20: mol_type = other DNA
aaaaaaaaaaattagccagg

SEQ ID NO: 290684 - DNA, 20 bp, synthetic construct
  source 1..20: mol_type = other DNA
aaaaaaaaaaaattagccag

SEQ ID NO: 290685 - DNA, 20 bp, synthetic construct
  source 1..20: mol_type = other DNA
aaaaaaaaaaaaattagcca

SEQ ID NO: 290686 - DNA, 20 bp, synthetic construct
  source 1..20: mol_type = other DNA
aaaaaaaaaaaaaattagcc

SEQ ID NO: 290687 - DNA, 20 bp, synthetic construct
  source 1..20: mol_type = other DNA
aaaaaaaaaaaaaaattagc

SEQ ID NO: 290688 - DNA, 20 bp, synthetic construct
  source 1..20: mol_type = other DNA
aaaaaaaaaaaaaaaattag

SEQ ID NO: 290689 - DNA, 20 bp, synthetic construct
  source 1..20: mol_type = other DNA
aaaaaaaaaaaaaaaaatta

SEQ ID NO: 290690 - DNA, 20 bp, synthetic construct
  source 1..20: mol_type = other DNA
aaaaaaaaaaaaaaaaaatt

SEQ ID NO: 290691 - DNA, 20 bp, synthetic construct
  source 1..20: mol_type = other DNA
aaaaaaaaaaaaaaaaaaat

SEQ ID NO: 290692 - DNA, 20 bp, synthetic construct
  source 1..20: mol_type = other DNA
aaaaaaaaaaaaaaaaaaaa

SEQ ID NO: 290693 - DNA, 20 bp, synthetic construct
  source 1..20: mol_type = other DNA
aaaaaaaaaaaaaaaaaaaa

SEQ ID NO: 290694 - DNA, 20 bp, synthetic construct
  source 1..20: mol_type = other DNA
aaaaaaaaaaaaaaaaaaaa

SEQ ID NO: 290695 - DNA, 20 bp, synthetic construct
  source 1..20: mol_type = other DNA
aaaaaaaaaaaaaaaaaaaa

SEQ ID NO: 290696 - DNA, 20 bp, synthetic construct
  source 1..20: mol_type = other DNA
aaaaaaaaaaaaaaaaaaaa

SEQ ID NO: 290697 - DNA, 20 bp, synthetic construct
  source 1..20: mol_type = other DNA
aaaaaaaaaaaaaaaaaaaa

SEQ ID NO: 290698 - DNA, 20 bp, synthetic construct
  source 1..20: mol_type = other DNA
aaaaaaaaaaaaaaaaaaaa

SEQ ID NO: 290699 - DNA, 20 bp, synthetic construct
  source 1..20: mol_type = other DNA
aaaaaaaaaaaaaaaaaaaa

SEQ ID NO: 290700 - DNA, 20 bp, synthetic construct
  source 1..20: mol_type = other DNA
aaaaaaaaaaaaaaaaaaaa

SEQ ID NO: 290701 - DNA, 20 bp, synthetic construct
  source 1..20: mol_type = other DNA
aaaaaaaaaaaaaaaaaaaa

SEQ ID NO: 290702 - DNA, 20 bp, synthetic construct
  source 1..20: mol_type = other DNA
aaaaaaaaaaaaaaaaaaaa

SEQ ID NO: 290703 - DNA, 20 bp, synthetic construct
  source 1..20: mol_type = other DNA
caaaaaaaaaaaaaaaaaaa

SEQ ID NO: 290704 - DNA, 20 bp, synthetic construct
  source 1..20: mol_type = other DNA
tcaaaaaaaaaaaaaaaaaa

SEQ ID NO: 290705 - DNA, 20 bp, synthetic construct
  source 1..20: mol_type = other DNA
ctcaaaaaaaaaaaaaaaaa

SEQ ID NO: 290706 - DNA, 20 bp, synthetic construct
  source 1..20: mol_type = other DNA
tctcaaaaaaaaaaaaaaaa

SEQ ID NO: 290707 - DNA, 20 bp, synthetic construct
  source 1..20: mol_type = other DNA
atctcaaaaaaaaaaaaaaa

SEQ ID NO: 290708 - DNA, 20 bp, synthetic construct
  source 1..20: mol_type = other DNA
catctcaaaaaaaaaaaaaa

SEQ ID NO: 290709 - DNA, 20 bp, synthetic construct
  source 1..20: mol_type = other DNA
ccatctcaaaaaaaaaaaaa

SEQ ID NO: 290710 - DNA, 20 bp, synthetic construct
  source 1..20: mol_type = other DNA
tccatctcaaaaaaaaaaaa

SEQ ID NO: 290711 - DNA, 20 bp, synthetic construct
  source 1..20: mol_type = other DNA
ctccatctcaaaaaaaaaaa

SEQ ID NO: 290712 - DNA, 20 bp, synthetic construct
  source 1..20: mol_type = other DNA
actccatctcaaaaaaaaaa

SEQ ID NO: 290713 - DNA, 20 bp, synthetic construct
  source 1..20: mol_type = other DNA
aactccatctcaaaaaaaaa

SEQ ID NO: 290714 - DNA, 20 bp, synthetic construct
  source 1..20: mol_type = other DNA
caactccatctcaaaaaaaa

SEQ ID NO: 290715 - DNA, 20 bp, synthetic construct
  source 1..20: mol_type = other DNA
acaactccatctcaaaaaaa

SEQ ID NO: 290716 - DNA, 20 bp, synthetic construct
  source 1..20: mol_type = other DNA
tacaactccatctcaaaaaa

SEQ ID NO: 290717 - DNA, 20 bp, synthetic construct
  source 1..20: mol_type = other DNA
gtacaactccatctcaaaaa

SEQ ID NO: 290718 - DNA, 20 bp, synthetic construct
  source 1..20: mol_type = other DNA
agtacaactccatctcaaaa

SEQ ID NO: 290719 - DNA, 20 bp, synthetic construct
  source 1..20: mol_type = other DNA
gagtacaactccatctcaaa

SEQ ID NO: 290720 - DNA, 20 bp, synthetic construct
  source 1..20: mol_type = other DNA
agagtacaactccatctcaa

SEQ ID NO: 290721 - DNA, 20 bp, synthetic construct
  source 1..20: mol_type = other DNA
gagagtacaactccatctca

SEQ ID NO: 290722 - DNA, 20 bp, synthetic construct
  source 1..20: mol_type = other DNA
tgagagtacaactccatctc

SEQ ID NO: 290723 - DNA, 20 bp, synthetic construct
  source 1..20: mol_type = other DNA
atgagagtacaactccatct

SEQ ID NO: 290724 - DNA, 20 bp, synthetic construct
  source 1..20: mol_type = other DNA
aatgagagtacaactccatc

SEQ ID NO: 290725 - DNA, 20 bp, synthetic construct
  source 1..20: mol_type = other DNA
caatgagagtacaactccat

SEQ ID NO: 290726 - DNA, 20 bp, synthetic construct
  source 1..20: mol_type = other DNA
gcaatgagagtacaactcca

SEQ ID NO: 290727 - DNA, 20 bp, synthetic construct
  source 1..20: mol_type = other DNA
ggcaatgagagtacaactcc

SEQ ID NO: 290728 - DNA, 20 bp, synthetic construct
  source 1..20: mol_type = other DNA
gggcaatgagagtacaactc

SEQ ID NO: 290729 - DNA, 20 bp, synthetic construct
  source 1..20: mol_type = other DNA
tgggcaatgagagtacaact

SEQ ID NO: 290730 - DNA, 20 bp, synthetic construct
  source 1..20: mol_type = other DNA
ctgggcaatgagagtacaac

SEQ ID NO: 290731 - DNA, 20 bp, synthetic construct
  source 1..20: mol_type = other DNA
cctgggcaatgagagtacaa

SEQ ID NO: 290732 - DNA, 20 bp, synthetic construct
  source 1..20: mol_type = other DNA
gcctgggcaatgagagtaca

SEQ ID NO: 290733 - DNA, 20 bp, synthetic construct
  source 1..20: mol_type = other DNA
agcctgggcaatgagagtac

SEQ ID NO: 290734 - DNA, 20 bp, synthetic construct
  source 1..20: mol_type = other DNA
cagcctgggcaatgagagta

SEQ ID NO: 290735 - DNA, 20 bp, synthetic construct
  source 1..20: mol_type = other DNA
ccagcctgggcaatgagagt

SEQ ID NO: 290736 - DNA, 20 bp, synthetic construct
  source 1..20: mol_type = other DNA
tccagcctgggcaatgagag

SEQ ID NO: 290737 - DNA, 20 bp, synthetic construct
  source 1..20: mol_type = other DNA
ttccagcctgggcaatgaga

SEQ ID NO: 290738 - DNA, 20 bp, synthetic construct
  source 1..20: mol_type = other DNA
attccagcctgggcaatgag

SEQ ID NO: 290739 - DNA, 20 bp, synthetic construct
  source 1..20: mol_type = other DNA
cattccagcctgggcaatga

SEQ ID NO: 290740 - DNA, 20 bp, synthetic construct
  source 1..20: mol_type = other DNA
acattccagcctgggcaatg

SEQ ID NO: 290741 - DNA, 20 bp, synthetic construct
  source 1..20: mol_type = other DNA
tacattccagcctgggcaat

SEQ ID NO: 290742 - DNA, 20 bp, synthetic construct
  source 1..20: mol_type = other DNA
ttacattccagcctgggcaa

SEQ ID NO: 290743 - DNA, 20 bp, synthetic construct
  source 1..20: mol_type = other DNA
attacattccagcctgggca

SEQ ID NO: 290744 - DNA, 20 bp, synthetic construct
  source 1..20: mol_type = other DNA
cattacattccagcctgggc

SEQ ID NO: 290745 - DNA, 20 bp, synthetic construct
  source 1..20: mol_type = other DNA
ccattacattccagcctggg

SEQ ID NO: 290746 - DNA, 20 bp, synthetic construct
  source 1..20: mol_type = other DNA
gccattacattccagcctgg

SEQ ID NO: 290747 - DNA, 20 bp, synthetic construct
  source 1..20: mol_type = other DNA
tgccattacattccagcctg

SEQ ID NO: 290748 - DNA, 20 bp, synthetic construct
  source 1..20: mol_type = other DNA
gtgccattacattccagcct

SEQ ID NO: 290749 - DNA, 20 bp, synthetic construct
  source 1..20: mol_type = other DNA
tgtgccattacattccagcc

SEQ ID NO: 290750 - DNA, 20 bp, synthetic construct
  source 1..20: mol_type = other DNA
ttgtgccattacattccagc

SEQ ID NO: 290751 - DNA, 20 bp, synthetic construct
  source 1..20: mol_type = other DNA
attgtgccattacattccag

SEQ ID NO: 290752 - DNA, 20 bp, synthetic construct
  source 1..20: mol_type = other DNA
gattgtgccattacattcca

SEQ ID NO: 290753 - DNA, 20 bp, synthetic construct
  source 1..20: mol_type = other DNA
agattgtgccattacattcc

SEQ ID NO: 290754 - DNA, 20 bp, synthetic construct
  source 1..20: mol_type = other DNA
gagattgtgccattacattc

SEQ ID NO: 290755 - DNA, 20 bp, synthetic construct
  source 1..20: mol_type = other DNA
cgagattgtgccattacatt

SEQ ID NO: 290756 - DNA, 20 bp, synthetic construct
  source 1..20: mol_type = other DNA
ccgagattgtgccattacat

SEQ ID NO: 290757 - DNA, 20 bp, synthetic construct
  source 1..20: mol_type = other DNA
gccgagattgtgccattaca

SEQ ID NO: 290758 - DNA, 20 bp, synthetic construct
  source 1..20: mol_type = other DNA
agccgagattgtgccattac

SEQ ID NO: 290759 - DNA, 20 bp, synthetic construct
  source 1..20: mol_type = other DNA
gagccgagattgtgccatta

SEQ ID NO: 290760 - DNA, 20 bp, synthetic construct
  source 1..20: mol_type = other DNA
tgagccgagattgtgccatt

SEQ ID NO: 290761 - DNA, 20 bp, synthetic construct
  source 1..20: mol_type = other DNA
gtgagccgagattgtgccat

SEQ ID NO: 290762 - DNA, 20 bp, synthetic construct
  source 1..20: mol_type = other DNA
agtgagccgagattgtgcca

SEQ ID NO: 290763 - DNA, 20 bp, synthetic construct
  source 1..20: mol_type = other DNA
cagtgagccgagattgtgcc

SEQ ID NO: 290764 - DNA, 20 bp, synthetic construct
  source 1..20: mol_type = other DNA
gcagtgagccgagattgtgc

SEQ ID NO: 290765 - DNA, 20 bp, synthetic construct
  source 1..20: mol_type = other DNA
tgcagtgagccgagattgtg

SEQ ID NO: 290766 - DNA, 20 bp, synthetic construct
  source 1..20: mol_type = other DNA
ttgcagtgagccgagattgt

SEQ ID NO: 290767 - DNA, 20 bp, synthetic construct
  source 1..20: mol_type = other DNA
gttgcagtgagccgagattg

SEQ ID NO: 290768 - DNA, 20 bp, synthetic construct
  source 1..20: mol_type = other DNA
ggttgcagtgagccgagatt

SEQ ID NO: 290769 - DNA, 20 bp, synthetic construct
  source 1..20: mol_type = other DNA
aggttgcagtgagccgagat

SEQ ID NO: 290770 - DNA, 20 bp, synthetic construct
  source 1..20: mol_type = other DNA
gaggttgcagtgagccgaga

SEQ ID NO: 290771 - DNA, 20 bp, synthetic construct
  source 1..20: mol_type = other DNA
ggaggttgcagtgagccgag

SEQ ID NO: 290772 - DNA, 20 bp, synthetic construct
  source 1..20: mol_type = other DNA
tggaggttgcagtgagccga

SEQ ID NO: 290773 - DNA, 20 bp, synthetic construct
  source 1..20: mol_type = other DNA
gtggaggttgcagtgagccg

SEQ ID NO: 290774 - DNA, 20 bp, synthetic construct
  source 1..20: mol_type = other DNA
ggtggaggttgcagtgagcc

SEQ ID NO: 290775 - DNA, 20 bp, synthetic construct
  source 1..20: mol_type = other DNA
aggtggaggttgcagtgagc

SEQ ID NO: 290776 - DNA, 20 bp, synthetic construct
  source 1..20: mol_type = other DNA
gaggtggaggttgcagtgag

SEQ ID NO: 290777 - DNA, 20 bp, synthetic construct
  source 1..20: mol_type = other DNA
ggaggtggaggttgcagtga

SEQ ID NO: 290778 - DNA, 20 bp, synthetic construct
  source 1..20: mol_type = other DNA
aggaggtggaggttgcagtg

SEQ ID NO: 290779 - DNA, 20 bp, synthetic construct
  source 1..20: mol_type = other DNA
caggaggtggaggttgcagt

SEQ ID NO: 290780 - DNA, 20 bp, synthetic construct
  source 1..20: mol_type = other DNA
ccaggaggtggaggttgcag

SEQ ID NO: 290781 - DNA, 20 bp, synthetic construct
  source 1..20: mol_type = other DNA
tccaggaggtggaggttgca

SEQ ID NO: 290782 - DNA, 20 bp, synthetic construct
  source 1..20: mol_type = other DNA
atccaggaggtggaggttgc

SEQ ID NO: 290783 - DNA, 20 bp, synthetic construct
  source 1..20: mol_type = other DNA
aatccaggaggtggaggttg

SEQ ID NO: 290784 - DNA, 20 bp, synthetic construct
  source 1..20: mol_type = other DNA
gaatccaggaggtggaggtt

SEQ ID NO: 290785 - DNA, 20 bp, synthetic construct
  source 1..20: mol_type = other DNA
tgaatccaggaggtggaggt

SEQ ID NO: 290786 - DNA, 20 bp, synthetic construct
  source 1..20: mol_type = other DNA
ttgaatccaggaggtggagg

SEQ ID NO: 290787 - DNA, 20 bp, synthetic construct
  source 1..20: mol_type = other DNA
cttgaatccaggaggtggag

SEQ ID NO: 290788 - DNA, 20 bp, synthetic construct
  source 1..20: mol_type = other DNA
gcttgaatccaggaggtgga

SEQ ID NO: 290789 - DNA, 20 bp, synthetic construct
  source 1..20: mol_type = other DNA
tgcttgaatccaggaggtgg

SEQ ID NO: 290790 - DNA, 20 bp, synthetic construct
  source 1..20: mol_type = other DNA
ttgcttgaatccaggaggtg

SEQ ID NO: 290791 - DNA, 20 bp, synthetic construct
  source 1..20: mol_type = other DNA
attgcttgaatccaggaggt

SEQ ID NO: 290792 - DNA, 20 bp, synthetic construct
  source 1..20: mol_type = other DNA
aattgcttgaatccaggagg

SEQ ID NO: 290793 - DNA, 20 bp, synthetic construct
  source 1..20: mol_type = other DNA
gaattgcttgaatccaggag

SEQ ID NO: 290794 - DNA, 20 bp, synthetic construct
  source 1..20: mol_type = other DNA
agaattgcttgaatccagga

SEQ ID NO: 290795 - DNA, 20 bp, synthetic construct
  source 1..20: mol_type = other DNA
gagaattgcttgaatccagg

SEQ ID NO: 290796 - DNA, 20 bp, synthetic construct
  source 1..20: mol_type = other DNA
ggagaattgcttgaatccag

SEQ ID NO: 290797 - DNA, 20 bp, synthetic construct
  source 1..20: mol_type = other DNA
aggagaattgcttgaatcca

SEQ ID NO: 290798 - DNA, 20 bp, synthetic construct
  source 1..20: mol_type = other DNA
caggagaattgcttgaatcc

SEQ ID NO: 290799 - DNA, 20 bp, synthetic construct
  source 1..20: mol_type = other DNA
acaggagaattgcttgaatc

SEQ ID NO: 290800 - DNA, 20 bp, synthetic construct
  source 1..20: mol_type = other DNA
gacaggagaattgcttgaat

SEQ ID NO: 290801 - DNA, 20 bp, synthetic construct
  source 1..20: mol_type = other DNA
agacaggagaattgcttgaa

SEQ ID NO: 290802 - DNA, 20 bp, synthetic construct
  source 1..20: mol_type = other DNA
gagacaggagaattgcttga

SEQ ID NO: 290803 - DNA, 20 bp, synthetic construct
  source 1..20: mol_type = other DNA
tgagacaggagaattgcttg

SEQ ID NO: 290804 - DNA, 20 bp, synthetic construct
  source 1..20: mol_type = other DNA
ctgagacaggagaattgctt

SEQ ID NO: 290805 - DNA, 20 bp, synthetic construct
  source 1..20: mol_type = other DNA
gctgagacaggagaattgct

SEQ ID NO: 290806 - DNA, 20 bp, synthetic construct
  source 1..20: mol_type = other DNA
agctgagacaggagaattgc

SEQ ID NO: 290807 - DNA, 20 bp, synthetic construct
  source 1..20: mol_type = other DNA
aagctgagacaggagaattg

SEQ ID NO: 290808 - DNA, 20 bp, synthetic construct
  source 1..20: mol_type = other DNA
gaagctgagacaggagaatt

SEQ ID NO: 290809 - DNA, 20 bp, synthetic construct
  source 1..20: mol_type = other DNA
ggaagctgagacaggagaat

SEQ ID NO: 290810 - DNA, 20 bp, synthetic construct
  source 1..20: mol_type = other DNA
gggaagctgagacaggagaa

SEQ ID NO: 290811 - DNA, 20 bp, synthetic construct
  source 1..20: mol_type = other DNA
tgggaagctgagacaggaga

SEQ ID NO: 290812 - DNA, 20 bp, synthetic construct
  source 1..20: mol_type = other DNA
ttgggaagctgagacaggag

SEQ ID NO: 290813 - DNA, 20 bp, synthetic construct
  source 1..20: mol_type = other DNA
cttgggaagctgagacagga

SEQ ID NO: 290814 - DNA, 20 bp, synthetic construct
  source 1..20: mol_type = other DNA
acttgggaagctgagacagg

SEQ ID NO: 290815 - DNA, 20 bp, synthetic construct
  source 1..20: mol_type = other DNA
tacttgggaagctgagacag

SEQ ID NO: 290816 - DNA, 20 bp, synthetic construct
  source 1..20: mol_type = other DNA
ctacttgggaagctgagaca

SEQ ID NO: 290817 - DNA, 20 bp, synthetic construct
  source 1..20: mol_type = other DNA
gctacttgggaagctgagac

SEQ ID NO: 290818 - DNA, 20 bp, synthetic construct
  source 1..20: mol_type = other DNA
agctacttgggaagctgaga

SEQ ID NO: 290819 - DNA, 20 bp, synthetic construct
  source 1..20: mol_type = other DNA
cagctacttgggaagctgag

SEQ ID NO: 290820 - DNA, 20 bp, synthetic construct
  source 1..20: mol_type = other DNA
ccagctacttgggaagctga

SEQ ID NO: 290821 - DNA, 20 bp, synthetic construct
  source 1..20: mol_type = other DNA
cccagctacttgggaagctg

SEQ ID NO: 290822 - DNA, 20 bp, synthetic construct
  source 1..20: mol_type = other DNA
tcccagctacttgggaagct

SEQ ID NO: 290823 - DNA, 20 bp, synthetic construct
  source 1..20: mol_type = other DNA
atcccagctacttgggaagc

SEQ ID NO: 290824 - DNA, 20 bp, synthetic construct
  source 1..20: mol_type = other DNA
aatcccagctacttgggaag

SEQ ID NO: 290825 - DNA, 20 bp, synthetic construct
  source 1..20: mol_type = other DNA
taatcccagctacttgggaa

SEQ ID NO: 290826 - DNA, 20 bp, synthetic construct
  source 1..20: mol_type = other DNA
gtaatcccagctacttggga

SEQ ID NO: 290827 - DNA, 20 bp, synthetic construct
  source 1..20: mol_type = other DNA
tgtaatcccagctacttggg

SEQ ID NO: 290828 - DNA, 20 bp, synthetic construct
  source 1..20: mol_type = other DNA
ctgtaatcccagctacttgg

SEQ ID NO: 290829 - DNA, 20 bp, synthetic construct
  source 1..20: mol_type = other DNA
cctgtaatcccagctacttg

SEQ ID NO: 290830 - DNA, 20 bp, synthetic construct
  source 1..20: mol_type = other DNA
acctgtaatcccagctactt

SEQ ID NO: 290831 - DNA, 20 bp, synthetic construct
  source 1..20: mol_type = other DNA
cacctgtaatcccagctact

SEQ ID NO: 290832 - DNA, 20 bp, synthetic construct
  source 1..20: mol_type = other DNA
gcacctgtaatcccagctac

SEQ ID NO: 290833 - DNA, 20 bp, synthetic construct
  source 1..20: mol_type = other DNA
ggcacctgtaatcccagcta

SEQ ID NO: 290834 - DNA, 20 bp, synthetic construct
  source 1..20: mol_type = other DNA
gggcacctgtaatcccagct

SEQ ID NO: 290835 - DNA, 20 bp, synthetic construct
  source 1..20: mol_type = other DNA
cgggcacctgtaatcccagc

SEQ ID NO: 290836 - DNA, 20 bp, synthetic construct
  source 1..20: mol_type = other DNA
gcgggcacctgtaatcccag

SEQ ID NO: 290837 - DNA, 20 bp, synthetic construct
  source 1..20: mol_type = other DNA
ggcgggcacctgtaatccca

SEQ ID NO: 290838 - DNA, 20 bp, synthetic construct
  source 1..20: mol_type = other DNA
tggcgggcacctgtaatccc

SEQ ID NO: 290839 - DNA, 20 bp, synthetic construct
  source 1..20: mol_type = other DNA
gtggcgggcacctgtaatcc

SEQ ID NO: 290840 - DNA, 20 bp, synthetic construct
  source 1..20: mol_type = other DNA
ggtggcgggcacctgtaatc

SEQ ID NO: 290841 - DNA, 20 bp, synthetic construct
  source 1..20: mol_type = other DNA
tggtggcgggcacctgtaat

SEQ ID NO: 290842 - DNA, 20 bp, synthetic construct
  source 1..20: mol_type = other DNA
atggtggcgggcacctgtaa

SEQ ID NO: 290843 - DNA, 20 bp, synthetic construct
  source 1..20: mol_type = other DNA
catggtggcgggcacctgta

SEQ ID NO: 290844 - DNA, 20 bp, synthetic construct
  source 1..20: mol_type = other DNA
gcatggtggcgggcacctgt

SEQ ID NO: 290845 - DNA, 20 bp, synthetic construct
  source 1..20: mol_type = other DNA
agcatggtggcgggcacctg

SEQ ID NO: 290846 - DNA, 20 bp, synthetic construct
  source 1..20: mol_type = other DNA
gagcatggtggcgggcacct

SEQ ID NO: 290847 - DNA, 20 bp, synthetic construct
  source 1..20: mol_type = other DNA
tgagcatggtggcgggcacc

SEQ ID NO: 290848 - DNA, 20 bp, synthetic construct
  source 1..20: mol_type = other DNA
ttgagcatggtggcgggcac

SEQ ID NO: 290849 - DNA, 20 bp, synthetic construct
  source 1..20: mol_type = other DNA
gttgagcatggtggcgggca

SEQ ID NO: 290850 - DNA, 20 bp, synthetic construct
  source 1..20: mol_type = other DNA
agttgagcatggtggcgggc

SEQ ID NO: 290851 - DNA, 20 bp, synthetic construct
  source 1..20: mol_type = other DNA
tagttgagcatggtggcggg

SEQ ID NO: 290852 - DNA, 20 bp, synthetic construct
  source 1..20: mol_type = other DNA
ttagttgagcatggtggcgg

SEQ ID NO: 290853 - DNA, 20 bp, synthetic construct
  source 1..20: mol_type = other DNA
attagttgagcatggtggcg

SEQ ID NO: 290854 - DNA, 20 bp, synthetic construct
  source 1..20: mol_type = other DNA
aattagttgagcatggtggc

SEQ ID NO: 290855 - DNA, 20 bp, synthetic construct
  source 1..20: mol_type = other DNA
aaattagttgagcatggtgg

SEQ ID NO: 290856 - DNA, 20 bp, synthetic construct
  source 1..20: mol_type = other DNA
aaaattagttgagcatggtg

SEQ ID NO: 290857 - DNA, 20 bp, synthetic construct
  source 1..20: mol_type = other DNA
aaaaattagttgagcatggt

SEQ ID NO: 290858 - DNA, 20 bp, synthetic construct
  source 1..20: mol_type = other DNA
caaaaattagttgagcatgg

SEQ ID NO: 290859 - DNA, 20 bp, synthetic construct
  source 1..20: mol_type = other DNA
acaaaaattagttgagcatg

SEQ ID NO: 290860 - DNA, 20 bp, synthetic construct
  source 1..20: mol_type = other DNA
tacaaaaattagttgagcat

SEQ ID NO: 290861 - DNA, 20 bp, synthetic construct
  source 1..20: mol_type = other DNA
atacaaaaattagttgagca

SEQ ID NO: 290862 - DNA, 20 bp, synthetic construct
  source 1..20: mol_type = other DNA
aatacaaaaattagttgagc

SEQ ID NO: 290863 - DNA, 20 bp, synthetic construct
  source 1..20: mol_type = other DNA
aaatacaaaaattagttgag

SEQ ID NO: 290864 - DNA, 20 bp, synthetic construct
  source 1..20: mol_type = other DNA
aaaatacaaaaattagttga

SEQ ID NO: 290865 - DNA, 20 bp, synthetic construct
  source 1..20: mol_type = other DNA
aaaaatacaaaaattagttg

SEQ ID NO: 290866 - DNA, 20 bp, synthetic construct
  source 1..20: mol_type = other DNA
aaaaaatacaaaaattagtt

SEQ ID NO: 290867 - DNA, 20 bp, synthetic construct
  source 1..20: mol_type = other DNA
aaaaaaatacaaaaattagt

SEQ ID NO: 290868 - DNA, 20 bp, synthetic construct
  source 1..20: mol_type = other DNA
aaaaaaaatacaaaaattag

SEQ ID NO: 290869 - DNA, 20 bp, synthetic construct
  source 1..20: mol_type = other DNA
aaaaaaaaatacaaaaatta

SEQ ID NO: 290870 - DNA, 20 bp, synthetic construct
  source 1..20: mol_type = other DNA
aaaaaaaaaatacaaaaatt

SEQ ID NO: 290871 - DNA, 20 bp, synthetic construct
  source 1..20: mol_type = other DNA
taaaaaaaaaatacaaaaat

SEQ ID NO: 290872 - DNA, 20 bp, synthetic construct
  source 1..20: mol_type = other DNA
ctaaaaaaaaaatacaaaaa

SEQ ID NO: 290873 - DNA, 20 bp, synthetic construct
  source 1..20: mol_type = other DNA
actaaaaaaaaaatacaaaa

SEQ ID NO: 290874 - DNA, 20 bp, synthetic construct
  source 1..20: mol_type = other DNA
tactaaaaaaaaaatacaaa

SEQ ID NO: 290875 - DNA, 20 bp, synthetic construct
  source 1..20: mol_type = other DNA
ctactaaaaaaaaaatacaa

SEQ ID NO: 290876 - DNA, 20 bp, synthetic construct
  source 1..20: mol_type = other DNA
tctactaaaaaaaaaataca

SEQ ID NO: 290877 - DNA, 20 bp, synthetic construct
  source 1..20: mol_type = other DNA
ctctactaaaaaaaaaatac

SEQ ID NO: 290878 - DNA, 20 bp, synthetic construct
  source 1..20: mol_type = other DNA
tctctactaaaaaaaaaata

SEQ ID NO: 290879 - DNA, 20 bp, synthetic construct
  source 1..20: mol_type = other DNA
gtctctactaaaaaaaaaat

SEQ ID NO: 290880 - DNA, 20 bp, synthetic construct
  source 1..20: mol_type = other DNA
cgtctctactaaaaaaaaaa

SEQ ID NO: 290881 - DNA, 20 bp, synthetic construct
  source 1..20: mol_type = other DNA
tcgtctctactaaaaaaaaa

SEQ ID NO: 290882 - DNA, 20 bp, synthetic construct
  source 1..20: mol_type = other DNA
ctcgtctctactaaaaaaaa

SEQ ID NO: 290883 - DNA, 20 bp, synthetic construct
  source 1..20: mol_type = other DNA
cctcgtctctactaaaaaaa

SEQ ID NO: 290884 - DNA, 20 bp, synthetic construct
  source 1..20: mol_type = other DNA
acctcgtctctactaaaaaa

SEQ ID NO: 290885 - DNA, 20 bp, synthetic construct
  source 1..20: mol_type = other DNA
aacctcgtctctactaaaaa

SEQ ID NO: 290886 - DNA, 20 bp, synthetic construct
  source 1..20: mol_type = other DNA
aaacctcgtctctactaaaa

SEQ ID NO: 290887 - DNA, 20 bp, synthetic construct
  source 1..20: mol_type = other DNA
gaaacctcgtctctactaaa

SEQ ID NO: 290888 - DNA, 20 bp, synthetic construct
  source 1..20: mol_type = other DNA
tgaaacctcgtctctactaa

SEQ ID NO: 290889 - DNA, 20 bp, synthetic construct
  source 1..20: mol_type = other DNA
gtgaaacctcgtctctacta

SEQ ID NO: 290890 - DNA, 20 bp, synthetic construct
  source 1..20: mol_type = other DNA
ggtgaaacctcgtctctact

SEQ ID NO: 290891 - DNA, 20 bp, synthetic construct
  source 1..20: mol_type = other DNA
tggtgaaacctcgtctctac

SEQ ID NO: 290892 - DNA, 20 bp, synthetic construct
  source 1..20: mol_type = other DNA
atggtgaaacctcgtctcta

SEQ ID NO: 290893 - DNA, 20 bp, synthetic construct
  source 1..20: mol_type = other DNA
catggtgaaacctcgtctct

SEQ ID NO: 290894 - DNA, 20 bp, synthetic construct
  source 1..20: mol_type = other DNA
acatggtgaaacctcgtctc

SEQ ID NO: 290895 - DNA, 20 bp, synthetic construct
  source 1..20: mol_type = other DNA
aacatggtgaaacctcgtct

SEQ ID NO: 290896 - DNA, 20 bp, synthetic construct
  source 1..20: mol_type = other DNA
caacatggtgaaacctcgtc

SEQ ID NO: 290897 - DNA, 20 bp, synthetic construct
  source 1..20: mol_type = other DNA
ccaacatggtgaaacctcgt

SEQ ID NO: 290898 - DNA, 20 bp, synthetic construct
  source 1..20: mol_type = other DNA
accaacatggtgaaacctcg

SEQ ID NO: 290899 - DNA, 20 bp, synthetic construct
  source 1..20: mol_type = other DNA
gaccaacatggtgaaacctc

SEQ ID NO: 290900 - DNA, 20 bp, synthetic construct
  source 1..20: mol_type = other DNA
tgaccaacatggtgaaacct

SEQ ID NO: 290901 - DNA, 20 bp, synthetic construct
  source 1..20: mol_type = other DNA
ctgaccaacatggtgaaacc

SEQ ID NO: 290902 - DNA, 20 bp, synthetic construct
  source 1..20: mol_type = other DNA
tctgaccaacatggtgaaac

SEQ ID NO: 290903 - DNA, 20 bp, synthetic construct
  source 1..20: mol_type = other DNA
gtctgaccaacatggtgaaa

SEQ ID NO: 290904 - DNA, 20 bp, synthetic construct
  source 1..20: mol_type = other DNA
agtctgaccaacatggtgaa

SEQ ID NO: 290905 - DNA, 20 bp, synthetic construct
  source 1..20: mol_type = other DNA
cagtctgaccaacatggtga

SEQ ID NO: 290906 - DNA, 20 bp, synthetic construct
  source 1..20: mol_type = other DNA
ccagtctgaccaacatggtg

SEQ ID NO: 290907 - DNA, 20 bp, synthetic construct
  source 1..20: mol_type = other DNA
accagtctgaccaacatggt

SEQ ID NO: 290908 - DNA, 20 bp, synthetic construct
  source 1..20: mol_type = other DNA
gaccagtctgaccaacatgg

SEQ ID NO: 290909 - DNA, 20 bp, synthetic construct
  source 1..20: mol_type = other DNA
agaccagtctgaccaacatg

SEQ ID NO: 290910 - DNA, 20 bp, synthetic construct
  source 1..20: mol_type = other DNA
gagaccagtctgaccaacat

SEQ ID NO: 290911 - DNA, 20 bp, synthetic construct
  source 1..20: mol_type = other DNA
tgagaccagtctgaccaaca

SEQ ID NO: 290912 - DNA, 20 bp, synthetic construct
  source 1..20: mol_type = other DNA
ttgagaccagtctgaccaac

SEQ ID NO: 290913 - DNA, 20 bp, synthetic construct
  source 1..20: mol_type = other DNA
tttgagaccagtctgaccaa

SEQ ID NO: 290914 - DNA, 20 bp, synthetic construct
  source 1..20: mol_type = other DNA
gtttgagaccagtctgacca

SEQ ID NO: 290915 - DNA, 20 bp, synthetic construct
  source 1..20: mol_type = other DNA
agtttgagaccagtctgacc

SEQ ID NO: 290916 - DNA, 20 bp, synthetic construct
  source 1..20: mol_type = other DNA
gagtttgagaccagtctgac

SEQ ID NO: 290917 - DNA, 20 bp, synthetic construct
  source 1..20: mol_type = other DNA
ggagtttgagaccagtctga

SEQ ID NO: 290918 - DNA, 20 bp, synthetic construct
  source 1..20: mol_type = other DNA
aggagtttgagaccagtctg

SEQ ID NO: 290919 - DNA, 20 bp, synthetic construct
  source 1..20: mol_type = other DNA
caggagtttgagaccagtct

SEQ ID NO: 290920 - DNA, 20 bp, synthetic construct
  source 1..20: mol_type = other DNA
tcaggagtttgagaccagtc

SEQ ID NO: 290921 - DNA, 20 bp, synthetic construct
  source 1..20: mol_type = other DNA
gtcaggagtttgagaccagt

SEQ ID NO: 290922 - DNA, 20 bp, synthetic construct
  source 1..20: mol_type = other DNA
ggtcaggagtttgagaccag

SEQ ID NO: 290923 - DNA, 20 bp, synthetic construct
  source 1..20: mol_type = other DNA
aggtcaggagtttgagacca

SEQ ID NO: 290924 - DNA, 20 bp, synthetic construct
  source 1..20: mol_type = other DNA
gaggtcaggagtttgagacc

SEQ ID NO: 290925 - DNA, 20 bp, synthetic construct
  source 1..20: mol_type = other DNA
tgaggtcaggagtttgagac

SEQ ID NO: 290926 - DNA, 20 bp, synthetic construct
  source 1..20: mol_type = other DNA
ctgaggtcaggagtttgaga

SEQ ID NO: 290927 - DNA, 20 bp, synthetic construct
  source 1..20: mol_type = other DNA
cctgaggtcaggagtttgag

SEQ ID NO: 290928 - DNA, 20 bp, synthetic construct
  source 1..20: mol_type = other DNA
acctgaggtcaggagtttga

SEQ ID NO: 290929 - DNA, 20 bp, synthetic construct
  source 1..20: mol_type = other DNA
cacctgaggtcaggagtttg

SEQ ID NO: 290930 - DNA, 20 bp, synthetic construct
  source 1..20: mol_type = other DNA
tcacctgaggtcaggagttt

SEQ ID NO: 290931 - DNA, 20 bp, synthetic construct
  source 1..20: mol_type = other DNA
atcacctgaggtcaggagtt

SEQ ID NO: 290932 - DNA, 20 bp, synthetic construct
  source 1..20: mol_type = other DNA
gatcacctgaggtcaggagt

SEQ ID NO: 290933 - DNA, 20 bp, synthetic construct
  source 1..20: mol_type = other DNA
ggatcacctgaggtcaggag

SEQ ID NO: 290934 - DNA, 20 bp, synthetic construct
  source 1..20: mol_type = other DNA
tggatcacctgaggtcagga

SEQ ID NO: 290935 - DNA, 20 bp, synthetic construct
  source 1..20: mol_type = other DNA
gtggatcacctgaggtcagg

SEQ ID NO: 290936 - DNA, 20 bp, synthetic construct
  source 1..20: mol_type = other DNA
ggtggatcacctgaggtcag

SEQ ID NO: 290937 - DNA, 20 bp, synthetic construct
  source 1..20: mol_type = other DNA
aggtggatcacctgaggtca

SEQ ID NO: 290938 - DNA, 20 bp, synthetic construct
  source 1..20: mol_type = other DNA
caggtggatcacctgaggtc

SEQ ID NO: 290939 - DNA, 20 bp, synthetic construct
  source 1..20: mol_type = other DNA
gcaggtggatcacctgaggt

SEQ ID NO: 290940 - DNA, 20 bp, synthetic construct
  source 1..20: mol_type = other DNA
ggcaggtggatcacctgagg

SEQ ID NO: 290941 - DNA, 20 bp, synthetic construct
  source 1..20: mol_type = other DNA
aggcaggtggatcacctgag

SEQ ID NO: 290942 - DNA, 20 bp, synthetic construct
  source 1..20: mol_type = other DNA
gaggcaggtggatcacctga

SEQ ID NO: 290943 - DNA, 20 bp, synthetic construct
  source 1..20: mol_type = other DNA
cgaggcaggtggatcacctg

SEQ ID NO: 290944 - DNA, 20 bp, synthetic construct
  source 1..20: mol_type = other DNA
ccgaggcaggtggatcacct

SEQ ID NO: 290945 - DNA, 20 bp, synthetic construct
  source 1..20: mol_type = other DNA
gccgaggcaggtggatcacc

SEQ ID NO: 290946 - DNA, 20 bp, synthetic construct
  source 1..20: mol_type = other DNA
ggccgaggcaggtggatcac

SEQ ID NO: 290947 - DNA, 20 bp, synthetic construct
  source 1..20: mol_type = other DNA
aggccgaggcaggtggatca

SEQ ID NO: 290948 - DNA, 20 bp, synthetic construct
  source 1..20: mol_type = other DNA
gaggccgaggcaggtggatc

SEQ ID NO: 290949 - DNA, 20 bp, synthetic construct
  source 1..20: mol_type = other DNA
ggaggccgaggcaggtggat

SEQ ID NO: 290950 - DNA, 20 bp, synthetic construct
  source 1..20: mol_type = other DNA
gggaggccgaggcaggtgga

SEQ ID NO: 290951 - DNA, 20 bp, synthetic construct
  source 1..20: mol_type = other DNA
tgggaggccgaggcaggtgg

SEQ ID NO: 290952 - DNA, 20 bp, synthetic construct
  source 1..20: mol_type = other DNA
ttgggaggccgaggcaggtg

SEQ ID NO: 290953 - DNA, 20 bp, synthetic construct
  source 1..20: mol_type = other DNA
tttgggaggccgaggcaggt

SEQ ID NO: 290954 - DNA, 20 bp, synthetic construct
  source 1..20: mol_type = other DNA
ctttgggaggccgaggcagg

SEQ ID NO: 290955 - DNA, 20 bp, synthetic construct
  source 1..20: mol_type = other DNA
actttgggaggccgaggcag

SEQ ID NO: 290956 - DNA, 20 bp, synthetic construct
  source 1..20: mol_type = other DNA
cactttgggaggccgaggca

SEQ ID NO: 290957 - DNA, 20 bp, synthetic construct
  source 1..20: mol_type = other DNA
gcactttgggaggccgaggc

SEQ ID NO: 290958 - DNA, 20 bp, synthetic construct
  source 1..20: mol_type = other DNA
agcactttgggaggccgagg

SEQ ID NO: 290959 - DNA, 20 bp, synthetic construct
  source 1..20: mol_type = other DNA
tagcactttgggaggccgag

SEQ ID NO: 290960 - DNA, 20 bp, synthetic construct
  source 1..20: mol_type = other DNA
ctagcactttgggaggccga

SEQ ID NO: 290961 - DNA, 20 bp, synthetic construct
  source 1..20: mol_type = other DNA
cctagcactttgggaggccg

SEQ ID NO: 290962 - DNA, 20 bp, synthetic construct
  source 1..20: mol_type = other DNA
tcctagcactttgggaggcc

SEQ ID NO: 290963 - DNA, 20 bp, synthetic construct
  source 1..20: mol_type = other DNA
atcctagcactttgggaggc

SEQ ID NO: 290964 - DNA, 20 bp, synthetic construct
  source 1..20: mol_type = other DNA
aatcctagcactttgggagg

SEQ ID NO: 290965 - DNA, 20 bp, synthetic construct
  source 1..20: mol_type = other DNA
taatcctagcactttgggag

SEQ ID NO: 290966 - DNA, 20 bp, synthetic construct
  source 1..20: mol_type = other DNA
gtaatcctagcactttggga

SEQ ID NO: 290967 - DNA, 20 bp, synthetic construct
  source 1..20: mol_type = other DNA
tgtaatcctagcactttggg

SEQ ID NO: 290968 - DNA, 20 bp, synthetic construct
  source 1..20: mol_type = other DNA
ctgtaatcctagcactttgg

SEQ ID NO: 290969 - DNA, 20 bp, synthetic construct
  source 1..20: mol_type = other DNA
cctgtaatcctagcactttg

SEQ ID NO: 290970 - DNA, 20 bp, synthetic construct
  source 1..20: mol_type = other DNA
gcctgtaatcctagcacttt

SEQ ID NO: 290971 - DNA, 20 bp, synthetic construct
  source 1..20: mol_type = other DNA
tgcctgtaatcctagcactt

SEQ ID NO: 290972 - DNA, 20 bp, synthetic construct
  source 1..20: mol_type = other DNA
atgcctgtaatcctagcact

SEQ ID NO: 290973 - DNA, 20 bp, synthetic construct
  source 1..20: mol_type = other DNA
catgcctgtaatcctagcac

SEQ ID NO: 290974 - DNA, 20 bp, synthetic construct
  source 1..20: mol_type = other DNA
tcatgcctgtaatcctagca

SEQ ID NO: 290975 - DNA, 20 bp, synthetic construct
  source 1..20: mol_type = other DNA
ctcatgcctgtaatcctagc

SEQ ID NO: 290976 - DNA, 20 bp, synthetic construct
  source 1..20: mol_type = other DNA
gctcatgcctgtaatcctag

SEQ ID NO: 290977 - DNA, 20 bp, synthetic construct
  source 1..20: mol_type = other DNA
ggctcatgcctgtaatccta

SEQ ID NO: 290978 - DNA, 20 bp, synthetic construct
  source 1..20: mol_type = other DNA
tggctcatgcctgtaatcct

SEQ ID NO: 290979 - DNA, 20 bp, synthetic construct
  source 1..20: mol_type = other DNA
gtggctcatgcctgtaatcc

SEQ ID NO: 290980 - DNA, 20 bp, synthetic construct
  source 1..20: mol_type = other DNA
ggtggctcatgcctgtaatc

SEQ ID NO: 290981 - DNA, 20 bp, synthetic construct
  source 1..20: mol_type = other DNA
tggtggctcatgcctgtaat

SEQ ID NO: 290982 - DNA, 20 bp, synthetic construct
  source 1..20: mol_type = other DNA
gtggtggctcatgcctgtaa

SEQ ID NO: 290983 - DNA, 20 bp, synthetic construct
  source 1..20: mol_type = other DNA
cgtggtggctcatgcctgta

SEQ ID NO: 290984 - DNA, 20 bp, synthetic construct
  source 1..20: mol_type = other DNA
gcgtggtggctcatgcctgt

SEQ ID NO: 290985 - DNA, 20 bp, synthetic construct
  source 1..20: mol_type = other DNA
ggcgtggtggctcatgcctg

SEQ ID NO: 290986 - DNA, 20 bp, synthetic construct
  source 1..20: mol_type = other DNA
gggcgtggtggctcatgcct

SEQ ID NO: 290987 - DNA, 20 bp, synthetic construct
  source 1..20: mol_type = other DNA
cgggcgtggtggctcatgcc

SEQ ID NO: 290988 - DNA, 20 bp, synthetic construct
  source 1..20: mol_type = other DNA
ccgggcgtggtggctcatgc

SEQ ID NO: 290989 - DNA, 20 bp, synthetic construct
  source 1..20: mol_type = other DNA
gccgggcgtggtggctcatg

SEQ ID NO: 290990 - DNA, 20 bp, synthetic construct
  source 1..20: mol_type = other DNA
ggccgggcgtggtggctcat

SEQ ID NO: 290991 - DNA, 20 bp, synthetic construct
  source 1..20: mol_type = other DNA
aggccgggcgtggtggctca

SEQ ID NO: 290992 - DNA, 20 bp, synthetic construct
  source 1..20: mol_type = other DNA
caggccgggcgtggtggctc

SEQ ID NO: 290993 - DNA, 20 bp, synthetic construct
  source 1..20: mol_type = other DNA
tcaggccgggcgtggtggct

SEQ ID NO: 290994 - DNA, 20 bp, synthetic construct
  source 1..20: mol_type = other DNA
ttcaggccgggcgtggtggc

SEQ ID NO: 290995 - DNA, 20 bp, synthetic construct
  source 1..20: mol_type = other DNA
tttcaggccgggcgtggtgg

SEQ ID NO: 290996 - DNA, 20 bp, synthetic construct
  source 1..20: mol_type = other DNA
ctttcaggccgggcgtggtg

SEQ ID NO: 290997 - DNA, 20 bp, synthetic construct
  source 1..20: mol_type = other DNA
cctttcaggccgggcgtggt

SEQ ID NO: 290998 - DNA, 20 bp, synthetic construct
  source 1..20: mol_type = other DNA
ccctttcaggccgggcgtgg

SEQ ID NO: 290999 - DNA, 20 bp, synthetic construct
  source 1..20: mol_type = other DNA
accctttcaggccgggcgtg

SEQ ID NO: 291000 - DNA, 20 bp, synthetic construct
  source 1..20: mol_type = other DNA
aaccctttcaggccgggcgt

SEQ ID NO: 291001 - DNA, 20 bp, synthetic construct
  source 1..20: mol_type = other DNA
gaaccctttcaggccgggcg

SEQ ID NO: 291002 - DNA, 20 bp, synthetic construct
  source 1..20: mol_type = other DNA
agaaccctttcaggccgggc

SEQ ID NO: 291003 - DNA, 20 bp, synthetic construct
  source 1..20: mol_type = other DNA
aagaaccctttcaggccggg

SEQ ID NO: 291004 - DNA, 20 bp, synthetic construct
  source 1..20: mol_type = other DNA
taagaaccctttcaggccgg

SEQ ID NO: 291005 - DNA, 20 bp, synthetic construct
  source 1..20: mol_type = other DNA
ataagaaccctttcaggccg

SEQ ID NO: 291006 - DNA, 20 bp, synthetic construct
  source 1..20: mol_type = other DNA
aataagaaccctttcaggcc

SEQ ID NO: 291007 - DNA, 20 bp, synthetic construct
  source 1..20: mol_type = other DNA
aaataagaaccctttcaggc

SEQ ID NO: 291008 - DNA, 20 bp, synthetic construct
  source 1..20: mol_type = other DNA
taaataagaaccctttcagg

SEQ ID NO: 291009 - DNA, 20 bp, synthetic construct
  source 1..20: mol_type = other DNA
ctaaataagaaccctttcag

SEQ ID NO: 291010 - DNA, 20 bp, synthetic construct
  source 1..20: mol_type = other DNA
actaaataagaaccctttca

SEQ ID NO: 291011 - DNA, 20 bp, synthetic construct
  source 1..20: mol_type = other DNA
cactaaataagaaccctttc

SEQ ID NO: 291012 - DNA, 20 bp, synthetic construct
  source 1..20: mol_type = other DNA
acactaaataagaacccttt

SEQ ID NO: 291013 - DNA, 20 bp, synthetic construct
  source 1..20: mol_type = other DNA
cacactaaataagaaccctt

SEQ ID NO: 291014 - DNA, 20 bp, synthetic construct
  source 1..20: mol_type = other DNA
gcacactaaataagaaccct

SEQ ID NO: 291015 - DNA, 20 bp, synthetic construct
  source 1..20: mol_type = other DNA
tgcacactaaataagaaccc

SEQ ID NO: 291016 - DNA, 20 bp, synthetic construct
  source 1..20: mol_type = other DNA
atgcacactaaataagaacc

SEQ ID NO: 291017 - DNA, 20 bp, synthetic construct
  source 1..20: mol_type = other DNA
aatgcacactaaataagaac

SEQ ID NO: 291018 - DNA, 20 bp, synthetic construct
  source 1..20: mol_type = other DNA
aaatgcacactaaataagaa

SEQ ID NO: 291019 - DNA, 20 bp, synthetic construct
  source 1..20: mol_type = other DNA
aaaatgcacactaaataaga

SEQ ID NO: 291020 - DNA, 20 bp, synthetic construct
  source 1..20: mol_type = other DNA
caaaatgcacactaaataag

SEQ ID NO: 291021 - DNA, 20 bp, synthetic construct
  source 1..20: mol_type = other DNA
tcaaaatgcacactaaataa

SEQ ID NO: 291022 - DNA, 20 bp, synthetic construct
  source 1..20: mol_type = other DNA
gtcaaaatgcacactaaata

SEQ ID NO: 291023 - DNA, 20 bp, synthetic construct
  source 1..20: mol_type = other DNA
tgtcaaaatgcacactaaat

SEQ ID NO: 291024 - DNA, 20 bp, synthetic construct
  source 1..20: mol_type = other DNA
atgtcaaaatgcacactaaa

SEQ ID NO: 291025 - DNA, 20 bp, synthetic construct
  source 1..20: mol_type = other DNA
aatgtcaaaatgcacactaa

SEQ ID NO: 291026 - DNA, 20 bp, synthetic construct
  source 1..20: mol_type = other DNA
gaatgtcaaaatgcacacta

SEQ ID NO: 291027 - DNA, 20 bp, synthetic construct
  source 1..20: mol_type = other DNA
tgaatgtcaaaatgcacact

SEQ ID NO: 291028 - DNA, 20 bp, synthetic construct
  source 1..20: mol_type = other DNA
ttgaatgtcaaaatgcacac

SEQ ID NO: 291029 - DNA, 20 bp, synthetic construct
  source 1..20: mol_type = other DNA
attgaatgtcaaaatgcaca

SEQ ID NO: 291030 - DNA, 20 bp, synthetic construct
  source 1..20: mol_type = other DNA
aattgaatgtcaaaatgcac

SEQ ID NO: 291031 - DNA, 20 bp, synthetic construct
  source 1..20: mol_type = other DNA
aaattgaatgtcaaaatgca

SEQ ID NO: 291032 - DNA, 20 bp, synthetic construct
  source 1..20: mol_type = other DNA
taaattgaatgtcaaaatgc

SEQ ID NO: 291033 - DNA, 20 bp, synthetic construct
  source 1..20: mol_type = other DNA
ttaaattgaatgtcaaaatg

SEQ ID NO: 291034 - DNA, 20 bp, synthetic construct
  source 1..20: mol_type = other DNA
attaaattgaatgtcaaaat

SEQ ID NO: 291035 - DNA, 20 bp, synthetic construct
  source 1..20: mol_type = other DNA
aattaaattgaatgtcaaaa

SEQ ID NO: 291036 - DNA, 20 bp, synthetic construct
  source 1..20: mol_type = other DNA
gaattaaattgaatgtcaaa

SEQ ID NO: 291037 - DNA, 20 bp, synthetic construct
  source 1..20: mol_type = other DNA
ggaattaaattgaatgtcaa

SEQ ID NO: 291038 - DNA, 20 bp, synthetic construct
  source 1..20: mol_type = other DNA
tggaattaaattgaatgtca

SEQ ID NO: 291039 - DNA, 20 bp, synthetic construct
  source 1..20: mol_type = other DNA
ttggaattaaattgaatgtc

SEQ ID NO: 291040 - DNA, 20 bp, synthetic construct
  source 1..20: mol_type = other DNA
cttggaattaaattgaatgt

SEQ ID NO: 291041 - DNA, 20 bp, synthetic construct
  source 1..20: mol_type = other DNA
ccttggaattaaattgaatg

SEQ ID NO: 291042 - DNA, 20 bp, synthetic construct
  source 1..20: mol_type = other DNA
accttggaattaaattgaat

SEQ ID NO: 291043 - DNA, 20 bp, synthetic construct
  source 1..20: mol_type = other DNA
gaccttggaattaaattgaa

SEQ ID NO: 291044 - DNA, 20 bp, synthetic construct
  source 1..20: mol_type = other DNA
agaccttggaattaaattga

SEQ ID NO: 291045 - DNA, 20 bp, synthetic construct
  source 1..20: mol_type = other DNA
aagaccttggaattaaattg

SEQ ID NO: 291046 - DNA, 20 bp, synthetic construct
  source 1..20: mol_type = other DNA
caagaccttggaattaaatt

SEQ ID NO: 291047 - DNA, 20 bp, synthetic construct
  source 1..20: mol_type = other DNA
acaagaccttggaattaaat

SEQ ID NO: 291048 - DNA, 20 bp, synthetic construct
  source 1..20: mol_type = other DNA
cacaagaccttggaattaaa

SEQ ID NO: 291049 - DNA, 20 bp, synthetic construct
  source 1..20: mol_type = other DNA
ccacaagaccttggaattaa

SEQ ID NO: 291050 - DNA, 20 bp, synthetic construct
  source 1..20: mol_type = other DNA
cccacaagaccttggaatta

SEQ ID NO: 291051 - DNA, 20 bp, synthetic construct
  source 1..20: mol_type = other DNA
ccccacaagaccttggaatt

SEQ ID NO: 291052 - DNA, 20 bp, synthetic construct
  source 1..20: mol_type = other DNA
accccacaagaccttggaat

SEQ ID NO: 291053 - DNA, 20 bp, synthetic construct
  source 1..20: mol_type = other DNA
gaccccacaagaccttggaa

SEQ ID NO: 291054 - DNA, 20 bp, synthetic construct
  source 1..20: mol_type = other DNA
tgaccccacaagaccttgga

SEQ ID NO: 291055 - DNA, 20 bp, synthetic construct
  source 1..20: mol_type = other DNA
atgaccccacaagaccttgg

SEQ ID NO: 291056 - DNA, 20 bp, synthetic construct
  source 1..20: mol_type = other DNA
catgaccccacaagaccttg

SEQ ID NO: 291057 - DNA, 20 bp, synthetic construct
  source 1..20: mol_type = other DNA
ccatgaccccacaagacctt

SEQ ID NO: 291058 - DNA, 20 bp, synthetic construct
  source 1..20: mol_type = other DNA
accatgaccccacaagacct

SEQ ID NO: 291059 - DNA, 20 bp, synthetic construct
  source 1..20: mol_type = other DNA
aaccatgaccccacaagacc

SEQ ID NO: 291060 - DNA, 20 bp, synthetic construct
  source 1..20: mol_type = other DNA
aaaccatgaccccacaagac

SEQ ID NO: 291061 - DNA, 20 bp, synthetic construct
  source 1..20: mol_type = other DNA
taaaccatgaccccacaaga

SEQ ID NO: 291062 - DNA, 20 bp, synthetic construct
  source 1..20: mol_type = other DNA
gtaaaccatgaccccacaag

SEQ ID NO: 291063 - DNA, 20 bp, synthetic construct
  source 1..20: mol_type = other DNA
tgtaaaccatgaccccacaa

SEQ ID NO: 291064 - DNA, 20 bp, synthetic construct
  source 1..20: mol_type = other DNA
ctgtaaaccatgaccccaca

SEQ ID NO: 291065 - DNA, 20 bp, synthetic construct
  source 1..20: mol_type = other DNA
cctgtaaaccatgaccccac

SEQ ID NO: 291066 - DNA, 20 bp, synthetic construct
  source 1..20: mol_type = other DNA
tcctgtaaaccatgacccca

SEQ ID NO: 291067 - DNA, 20 bp, synthetic construct
  source 1..20: mol_type = other DNA
atcctgtaaaccatgacccc

SEQ ID NO: 291068 - DNA, 20 bp, synthetic construct
  source 1..20: mol_type = other DNA
catcctgtaaaccatgaccc

SEQ ID NO: 291069 - DNA, 20 bp, synthetic construct
  source 1..20: mol_type = other DNA
acatcctgtaaaccatgacc

SEQ ID NO: 291070 - DNA, 20 bp, synthetic construct
  source 1..20: mol_type = other DNA
aacatcctgtaaaccatgac

SEQ ID NO: 291071 - DNA, 20 bp, synthetic construct
  source 1..20: mol_type = other DNA
caacatcctgtaaaccatga

SEQ ID NO: 291072 - DNA, 20 bp, synthetic construct
  source 1..20: mol_type = other DNA
tcaacatcctgtaaaccatg

SEQ ID NO: 291073 - DNA, 20 bp, synthetic construct
  source 1..20: mol_type = other DNA
atcaacatcctgtaaaccat

SEQ ID NO: 291074 - DNA, 20 bp, synthetic construct
  source 1..20: mol_type = other DNA
tatcaacatcctgtaaacca

SEQ ID NO: 291075 - DNA, 20 bp, synthetic construct
  source 1..20: mol_type = other DNA
atatcaacatcctgtaaacc

SEQ ID NO: 291076 - DNA, 20 bp, synthetic construct
  source 1..20: mol_type = other DNA
tatatcaacatcctgtaaac

SEQ ID NO: 291077 - DNA, 20 bp, synthetic construct
  source 1..20: mol_type = other DNA
ctatatcaacatcctgtaaa

SEQ ID NO: 291078 - DNA, 20 bp, synthetic construct
  source 1..20: mol_type = other DNA
tctatatcaacatcctgtaa

SEQ ID NO: 291079 - DNA, 20 bp, synthetic construct
  source 1..20: mol_type = other DNA
ttctatatcaacatcctgta

SEQ ID NO: 291080 - DNA, 20 bp, synthetic construct
  source 1..20: mol_type = other DNA
tttctatatcaacatcctgt

SEQ ID NO: 291081 - DNA, 20 bp, synthetic construct
  source 1..20: mol_type = other DNA
ttttctatatcaacatcctg

SEQ ID NO: 291082 - DNA, 20 bp, synthetic construct
  source 1..20: mol_type = other DNA
cttttctatatcaacatcct

SEQ ID NO: 291083 - DNA, 20 bp, synthetic construct
  source 1..20: mol_type = other DNA
tcttttctatatcaacatcc

SEQ ID NO: 291084 - DNA, 20 bp, synthetic construct
  source 1..20: mol_type = other DNA
gtcttttctatatcaacatc

SEQ ID NO: 291085 - DNA, 20 bp, synthetic construct
  source 1..20: mol_type = other DNA
agtcttttctatatcaacat

SEQ ID NO: 291086 - DNA, 20 bp, synthetic construct
  source 1..20: mol_type = other DNA
aagtcttttctatatcaaca

SEQ ID NO: 291087 - DNA, 20 bp, synthetic construct
  source 1..20: mol_type = other DNA
gaagtcttttctatatcaac

SEQ ID NO: 291088 - DNA, 20 bp, synthetic construct
  source 1..20: mol_type = other DNA
tgaagtcttttctatatcaa

SEQ ID NO: 291089 - DNA, 20 bp, synthetic construct
  source 1..20: mol_type = other DNA
gtgaagtcttttctatatca

SEQ ID NO: 291090 - DNA, 20 bp, synthetic construct
  source 1..20: mol_type = other DNA
agtgaagtcttttctatatc

SEQ ID NO: 291091 - DNA, 20 bp, synthetic construct
  source 1..20: mol_type = other DNA
aagtgaagtcttttctatat

SEQ ID NO: 291092 - DNA, 20 bp, synthetic construct
  source 1..20: mol_type = other DNA
taagtgaagtcttttctata

SEQ ID NO: 291093 - DNA, 20 bp, synthetic construct
  source 1..20: mol_type = other DNA
ttaagtgaagtcttttctat

SEQ ID NO: 291094 - DNA, 20 bp, synthetic construct
  source 1..20: mol_type = other DNA
attaagtgaagtcttttcta

SEQ ID NO: 291095 - DNA, 20 bp, synthetic construct
  source 1..20: mol_type = other DNA
cattaagtgaagtcttttct

SEQ ID NO: 291096 - DNA, 20 bp, synthetic construct
  source 1..20: mol_type = other DNA
ccattaagtgaagtcttttc

SEQ ID NO: 291097 - DNA, 20 bp, synthetic construct
  source 1..20: mol_type = other DNA
cccattaagtgaagtctttt

SEQ ID NO: 291098 - DNA, 20 bp, synthetic construct
  source 1..20: mol_type = other DNA
gcccattaagtgaagtcttt

SEQ ID NO: 291099 - DNA, 20 bp, synthetic construct
  source 1..20: mol_type = other DNA
ggcccattaagtgaagtctt

SEQ ID NO: 291100 - DNA, 20 bp, synthetic construct
  source 1..20: mol_type = other DNA
cggcccattaagtgaagtct

SEQ ID NO: 291101 - DNA, 20 bp, synthetic construct
  source 1..20: mol_type = other DNA
ccggcccattaagtgaagtc

SEQ ID NO: 291102 - DNA, 20 bp, synthetic construct
  source 1..20: mol_type = other DNA
cccggcccattaagtgaagt

SEQ ID NO: 291103 - DNA, 20 bp, synthetic construct
  source 1..20: mol_type = other DNA
gcccggcccattaagtgaag

SEQ ID NO: 291104 - DNA, 20 bp, synthetic construct
  source 1..20: mol_type = other DNA
cgcccggcccattaagtgaa

SEQ ID NO: 291105 - DNA, 20 bp, synthetic construct
  source 1..20: mol_type = other DNA
gcgcccggcccattaagtga

SEQ ID NO: 291106 - DNA, 20 bp, synthetic construct
  source 1..20: mol_type = other DNA
tgcgcccggcccattaagtg

SEQ ID NO: 291107 - DNA, 20 bp, synthetic construct
  source 1..20: mol_type = other DNA
ctgcgcccggcccattaagt

SEQ ID NO: 291108 - DNA, 20 bp, synthetic construct
  source 1..20: mol_type = other DNA
actgcgcccggcccattaag

SEQ ID NO: 291109 - DNA, 20 bp, synthetic construct
  source 1..20: mol_type = other DNA
cactgcgcccggcccattaa

SEQ ID NO: 291110 - DNA, 20 bp, synthetic construct
  source 1..20: mol_type = other DNA
ccactgcgcccggcccatta

SEQ ID NO: 291111 - DNA, 20 bp, synthetic construct
  source 1..20: mol_type = other DNA
gccactgcgcccggcccatt

SEQ ID NO: 291112 - DNA, 20 bp, synthetic construct
  source 1..20: mol_type = other DNA
agccactgcgcccggcccat

SEQ ID NO: 291113 - DNA, 20 bp, synthetic construct
  source 1..20: mol_type = other DNA
gagccactgcgcccggccca

SEQ ID NO: 291114 - DNA, 20 bp, synthetic construct
  source 1..20: mol_type = other DNA
tgagccactgcgcccggccc

SEQ ID NO: 291115 - DNA, 20 bp, synthetic construct
  source 1..20: mol_type = other DNA
atgagccactgcgcccggcc

SEQ ID NO: 291116 - DNA, 20 bp, synthetic construct
  source 1..20: mol_type = other DNA
catgagccactgcgcccggc

SEQ ID NO: 291117 - DNA, 20 bp, synthetic construct
  source 1..20: mol_type = other DNA
gcatgagccactgcgcccgg

SEQ ID NO: 291118 - DNA, 20 bp, synthetic construct
  source 1..20: mol_type = other DNA
ggcatgagccactgcgcccg

SEQ ID NO: 291119 - DNA, 20 bp, synthetic construct
  source 1..20: mol_type = other DNA
aggcatgagccactgcgccc

SEQ ID NO: 291120 - DNA, 20 bp, synthetic construct
  source 1..20: mol_type = other DNA
caggcatgagccactgcgcc

SEQ ID NO: 291121 - DNA, 20 bp, synthetic construct
  source 1..20: mol_type = other DNA
acaggcatgagccactgcgc

SEQ ID NO: 291122 - DNA, 20 bp, synthetic construct
  source 1..20: mol_type = other DNA
tacaggcatgagccactgcg

SEQ ID NO: 291123 - DNA, 20 bp, synthetic construct
  source 1..20: mol_type = other DNA
ttacaggcatgagccactgc

SEQ ID NO: 291124 - DNA, 20 bp, synthetic construct
  source 1..20: mol_type = other DNA
attacaggcatgagccactg

SEQ ID NO: 291125 - DNA, 20 bp, synthetic construct
  source 1..20: mol_type = other DNA
gattacaggcatgagccact

SEQ ID NO: 291126 - DNA, 20 bp, synthetic construct
  source 1..20: mol_type = other DNA
ggattacaggcatgagccac

SEQ ID NO: 291127 - DNA, 20 bp, synthetic construct
  source 1..20: mol_type = other DNA
gggattacaggcatgagcca

SEQ ID NO: 291128 - DNA, 20 bp, synthetic construct
  source 1..20: mol_type = other DNA
tgggattacaggcatgagcc

SEQ ID NO: 291129 - DNA, 20 bp, synthetic construct
  source 1..20: mol_type = other DNA
ctgggattacaggcatgagc

SEQ ID NO: 291130 - DNA, 20 bp, synthetic construct
  source 1..20: mol_type = other DNA
gctgggattacaggcatgag

SEQ ID NO: 291131 - DNA, 20 bp, synthetic construct
  source 1..20: mol_type = other DNA
tgctgggattacaggcatga

SEQ ID NO: 291132 - DNA, 20 bp, synthetic construct
  source 1..20: mol_type = other DNA
gtgctgggattacaggcatg

SEQ ID NO: 291133 - DNA, 20 bp, synthetic construct
  source 1..20: mol_type = other DNA
agtgctgggattacaggcat

SEQ ID NO: 291134 - DNA, 20 bp, synthetic construct
  source 1..20: mol_type = other DNA
aagtgctgggattacaggca

SEQ ID NO: 291135 - DNA, 20 bp, synthetic construct
  source 1..20: mol_type = other DNA
aaagtgctgggattacaggc

SEQ ID NO: 291136 - DNA, 20 bp, synthetic construct
  source 1..20: mol_type = other DNA
caaagtgctgggattacagg

SEQ ID NO: 291137 - DNA, 20 bp, synthetic construct
  source 1..20: mol_type = other DNA
ccaaagtgctgggattacag

SEQ ID NO: 291138 - DNA, 20 bp, synthetic construct
  source 1..20: mol_type = other DNA
cccaaagtgctgggattaca

SEQ ID NO: 291139 - DNA, 20 bp, synthetic construct
  source 1..20: mol_type = other DNA
tcccaaagtgctgggattac

SEQ ID NO: 291140 - DNA, 20 bp, synthetic construct
  source 1..20: mol_type = other DNA
ctcccaaagtgctgggatta

SEQ ID NO: 291141 - DNA, 20 bp, synthetic construct
  source 1..20: mol_type = other DNA
cctcccaaagtgctgggatt

SEQ ID NO: 291142 - DNA, 20 bp, synthetic construct
  source 1..20: mol_type = other DNA
gcctcccaaagtgctgggat

SEQ ID NO: 291143 - DNA, 20 bp, synthetic construct
  source 1..20: mol_type = other DNA
ggcctcccaaagtgctggga

SEQ ID NO: 291144 - DNA, 20 bp, synthetic construct
  source 1..20: mol_type = other DNA
cggcctcccaaagtgctggg

SEQ ID NO: 291145 - DNA, 20 bp, synthetic construct
  source 1..20: mol_type = other DNA
tcggcctcccaaagtgctgg

SEQ ID NO: 291146 - DNA, 20 bp, synthetic construct
  source 1..20: mol_type = other DNA
ctcggcctcccaaagtgctg

SEQ ID NO: 291147 - DNA, 20 bp, synthetic construct
  source 1..20: mol_type = other DNA
cctcggcctcccaaagtgct

SEQ ID NO: 291148 - DNA, 20 bp, synthetic construct
  source 1..20: mol_type = other DNA
gcctcggcctcccaaagtgc

SEQ ID NO: 291149 - DNA, 20 bp, synthetic construct
  source 1..20: mol_type = other DNA
tgcctcggcctcccaaagtg

SEQ ID NO: 291150 - DNA, 20 bp, synthetic construct
  source 1..20: mol_type = other DNA
ctgcctcggcctcccaaagt

SEQ ID NO: 291151 - DNA, 20 bp, synthetic construct
  source 1..20: mol_type = other DNA
cctgcctcggcctcccaaag

SEQ ID NO: 291152 - DNA, 20 bp, synthetic construct
  source 1..20: mol_type = other DNA
gcctgcctcggcctcccaaa

SEQ ID NO: 291153 - DNA, 20 bp, synthetic construct
  source 1..20: mol_type = other DNA
tgcctgcctcggcctcccaa

SEQ ID NO: 291154 - DNA, 20 bp, synthetic construct
  source 1..20: mol_type = other DNA
ctgcctgcctcggcctccca

SEQ ID NO: 291155 - DNA, 20 bp, synthetic construct
  source 1..20: mol_type = other DNA
tctgcctgcctcggcctccc

SEQ ID NO: 291156 - DNA, 20 bp, synthetic construct
  source 1..20: mol_type = other DNA
atctgcctgcctcggcctcc

SEQ ID NO: 291157 - DNA, 20 bp, synthetic construct
  source 1..20: mol_type = other DNA
gatctgcctgcctcggcctc

SEQ ID NO: 291158 - DNA, 20 bp, synthetic construct
  source 1..20: mol_type = other DNA
tgatctgcctgcctcggcct

SEQ ID NO: 291159 - DNA, 20 bp, synthetic construct
  source 1..20: mol_type = other DNA
ctgatctgcctgcctcggcc

SEQ ID NO: 291160 - DNA, 20 bp, synthetic construct
  source 1..20: mol_type = other DNA
cctgatctgcctgcctcggc

SEQ ID NO: 291161 - DNA, 20 bp, synthetic construct
  source 1..20: mol_type = other DNA
tcctgatctgcctgcctcgg

SEQ ID NO: 291162 - DNA, 20 bp, synthetic construct
  source 1..20: mol_type = other DNA
ctcctgatctgcctgcctcg

SEQ ID NO: 291163 - DNA, 20 bp, synthetic construct
  source 1..20: mol_type = other DNA
cctcctgatctgcctgcctc

SEQ ID NO: 291164 - DNA, 20 bp, synthetic construct
  source 1..20: mol_type = other DNA
acctcctgatctgcctgcct

SEQ ID NO: 291165 - DNA, 20 bp, synthetic construct
  source 1..20: mol_type = other DNA
gacctcctgatctgcctgcc

SEQ ID NO: 291166 - DNA, 20 bp, synthetic construct
  source 1..20: mol_type = other DNA
tgacctcctgatctgcctgc

SEQ ID NO: 291167 - DNA, 20 bp, synthetic construct
  source 1..20: mol_type = other DNA
ctgacctcctgatctgcctg

SEQ ID NO: 291168 - DNA, 20 bp, synthetic construct
  source 1..20: mol_type = other DNA
cctgacctcctgatctgcct

SEQ ID NO: 291169 - DNA, 20 bp, synthetic construct
  source 1..20: mol_type = other DNA
tcctgacctcctgatctgcc

SEQ ID NO: 291170 - DNA, 20 bp, synthetic construct
  source 1..20: mol_type = other DNA
ctcctgacctcctgatctgc

SEQ ID NO: 291171 - DNA, 20 bp, synthetic construct
  source 1..20: mol_type = other DNA
tctcctgacctcctgatctg

SEQ ID NO: 291172 - DNA, 20 bp, synthetic construct
  source 1..20: mol_type = other DNA
atctcctgacctcctgatct

SEQ ID NO: 291173 - DNA, 20 bp, synthetic construct
  source 1..20: mol_type = other DNA
aatctcctgacctcctgatc

SEQ ID NO: 291174 - DNA, 20 bp, synthetic construct
  source 1..20: mol_type = other DNA
caatctcctgacctcctgat

SEQ ID NO: 291175 - DNA, 20 bp, synthetic construct
  source 1..20: mol_type = other DNA
tcaatctcctgacctcctga

SEQ ID NO: 291176 - DNA, 20 bp, synthetic construct
  source 1..20: mol_type = other DNA
ctcaatctcctgacctcctg

SEQ ID NO: 291177 - DNA, 20 bp, synthetic construct
  source 1..20: mol_type = other DNA
tctcaatctcctgacctcct

SEQ ID NO: 291178 - DNA, 20 bp, synthetic construct
  source 1..20: mol_type = other DNA
gtctcaatctcctgacctcc

SEQ ID NO: 291179 - DNA, 20 bp, synthetic construct
  source 1..20: mol_type = other DNA
ggtctcaatctcctgacctc

SEQ ID NO: 291180 - DNA, 20 bp, synthetic construct
  source 1..20: mol_type = other DNA
tggtctcaatctcctgacct

SEQ ID NO: 291181 - DNA, 20 bp, synthetic construct
  source 1..20: mol_type = other DNA
atggtctcaatctcctgacc

SEQ ID NO: 291182 - DNA, 20 bp, synthetic construct
  source 1..20: mol_type = other DNA
gatggtctcaatctcctgac

SEQ ID NO: 291183 - DNA, 20 bp, synthetic construct
  source 1..20: mol_type = other DNA
ggatggtctcaatctcctga

SEQ ID NO: 291184 - DNA, 20 bp, synthetic construct
  source 1..20: mol_type = other DNA
aggatggtctcaatctcctg

SEQ ID NO: 291185 - DNA, 20 bp, synthetic construct
  source 1..20: mol_type = other DNA
caggatggtctcaatctcct

SEQ ID NO: 291186 - DNA, 20 bp, synthetic construct
  source 1..20: mol_type = other DNA
ccaggatggtctcaatctcc

SEQ ID NO: 291187 - DNA, 20 bp, synthetic construct
  source 1..20: mol_type = other DNA
gccaggatggtctcaatctc

SEQ ID NO: 291188 - DNA, 20 bp, synthetic construct
  source 1..20: mol_type = other DNA
agccaggatggtctcaatct

SEQ ID NO: 291189 - DNA, 20 bp, synthetic construct
  source 1..20: mol_type = other DNA
tagccaggatggtctcaatc

SEQ ID NO: 291190 - DNA, 20 bp, synthetic construct
  source 1..20: mol_type = other DNA
ttagccaggatggtctcaat

SEQ ID NO: 291191 - DNA, 20 bp, synthetic construct
  source 1..20: mol_type = other DNA
gttagccaggatggtctcaa

SEQ ID NO: 291192 - DNA, 20 bp, synthetic construct
  source 1..20: mol_type = other DNA
tgttagccaggatggtctca

SEQ ID NO: 291193 - DNA, 20 bp, synthetic construct
  source 1..20: mol_type = other DNA
gtgttagccaggatggtctc

SEQ ID NO: 291194 - DNA, 20 bp, synthetic construct
  source 1..20: mol_type = other DNA
tgtgttagccaggatggtct

SEQ ID NO: 291195 - DNA, 20 bp, synthetic construct
  source 1..20: mol_type = other DNA
ctgtgttagccaggatggtc

SEQ ID NO: 291196 - DNA, 20 bp, synthetic construct
  source 1..20: mol_type = other DNA
actgtgttagccaggatggt

SEQ ID NO: 291197 - DNA, 20 bp, synthetic construct
  source 1..20: mol_type = other DNA
cactgtgttagccaggatgg

SEQ ID NO: 291198 - DNA, 20 bp, synthetic construct
  source 1..20: mol_type = other DNA
tcactgtgttagccaggatg

SEQ ID NO: 291199 - DNA, 20 bp, synthetic construct
  source 1..20: mol_type = other DNA
ttcactgtgttagccaggat

SEQ ID NO: 291200 - DNA, 20 bp, synthetic construct
  source 1..20: mol_type = other DNA
tttcactgtgttagccagga

SEQ ID NO: 291201 - DNA, 20 bp, synthetic construct
  source 1..20: mol_type = other DNA
gtttcactgtgttagccagg

SEQ ID NO: 291202 - DNA, 20 bp, synthetic construct
  source 1..20: mol_type = other DNA
ggtttcactgtgttagccag

SEQ ID NO: 291203 - DNA, 20 bp, synthetic construct
  source 1..20: mol_type = other DNA
gggtttcactgtgttagcca

SEQ ID NO: 291204 - DNA, 20 bp, synthetic construct
  source 1..20: mol_type = other DNA
ggggtttcactgtgttagcc

SEQ ID NO: 291205 - DNA, 20 bp, synthetic construct
  source 1..20: mol_type = other DNA
tggggtttcactgtgttagc

SEQ ID NO: 291206 - DNA, 20 bp, synthetic construct
  source 1..20: mol_type = other DNA
atggggtttcactgtgttag

SEQ ID NO: 291207 - DNA, 20 bp, synthetic construct
  source 1..20: mol_type = other DNA
gatggggtttcactgtgtta

SEQ ID NO: 291208 - DNA, 20 bp, synthetic construct
  source 1..20: mol_type = other DNA
agatggggtttcactgtgtt

SEQ ID NO: 291209 - DNA, 20 bp, synthetic construct
  source 1..20: mol_type = other DNA
gagatggggtttcactgtgt

SEQ ID NO: 291210 - DNA, 20 bp, synthetic construct
  source 1..20: mol_type = other DNA
agagatggggtttcactgtg

SEQ ID NO: 291211 - DNA, 20 bp, synthetic construct
  source 1..20: mol_type = other DNA
tagagatggggtttcactgt

SEQ ID NO: 291212 - DNA, 20 bp, synthetic construct
  source 1..20: mol_type = other DNA
gtagagatggggtttcactg

SEQ ID NO: 291213 - DNA, 20 bp, synthetic construct
  source 1..20: mol_type = other DNA
agtagagatggggtttcact

SEQ ID NO: 291214 - DNA, 20 bp, synthetic construct
  source 1..20: mol_type = other DNA
cagtagagatggggtttcac

SEQ ID NO: 291215 - DNA, 20 bp, synthetic construct
  source 1..20: mol_type = other DNA
tcagtagagatggggtttca

SEQ ID NO: 291216 - DNA, 20 bp, synthetic construct
  source 1..20: mol_type = other DNA
ttcagtagagatggggtttc

SEQ ID NO: 291217 - DNA, 20 bp, synthetic construct
  source 1..20: mol_type = other DNA
tttcagtagagatggggttt

SEQ ID NO: 291218 - DNA, 20 bp, synthetic construct
  source 1..20: mol_type = other DNA
ttttcagtagagatggggtt

SEQ ID NO: 291219 - DNA, 20 bp, synthetic construct
  source 1..20: mol_type = other DNA
attttcagtagagatggggt

SEQ ID NO: 291220 - DNA, 20 bp, synthetic construct
  source 1..20: mol_type = other DNA
tattttcagtagagatgggg

SEQ ID NO: 291221 - DNA, 20 bp, synthetic construct
  source 1..20: mol_type = other DNA
gtattttcagtagagatggg

SEQ ID NO: 291222 - DNA, 20 bp, synthetic construct
  source 1..20: mol_type = other DNA
tgtattttcagtagagatgg

SEQ ID NO: 291223 - DNA, 20 bp, synthetic construct
  source 1..20: mol_type = other DNA
ttgtattttcagtagagatg

SEQ ID NO: 291224 - DNA, 20 bp, synthetic construct
  source 1..20: mol_type = other DNA
tttgtattttcagtagagat

SEQ ID NO: 291225 - DNA, 20 bp, synthetic construct
  source 1..20: mol_type = other DNA
ttttgtattttcagtagaga

SEQ ID NO: 291226 - DNA, 20 bp, synthetic construct
  source 1..20: mol_type = other DNA
tttttgtattttcagtagag

SEQ ID NO: 291227 - DNA, 20 bp, synthetic construct
  source 1..20: mol_type = other DNA
ttttttgtattttcagtaga

SEQ ID NO: 291228 - DNA, 20 bp, synthetic construct
  source 1..20: mol_type = other DNA
attttttgtattttcagtag

SEQ ID NO: 291229 - DNA, 20 bp, synthetic construct
  source 1..20: mol_type = other DNA
aattttttgtattttcagta

SEQ ID NO: 291230 - DNA, 20 bp, synthetic construct
  source 1..20: mol_type = other DNA
taattttttgtattttcagt

SEQ ID NO: 291231 - DNA, 20 bp, synthetic construct
  source 1..20: mol_type = other DNA
ctaattttttgtattttcag

SEQ ID NO: 291232 - DNA, 20 bp, synthetic construct
  source 1..20: mol_type = other DNA
gctaattttttgtattttca

SEQ ID NO: 291233 - DNA, 20 bp, synthetic construct
  source 1..20: mol_type = other DNA
agctaattttttgtattttc

SEQ ID NO: 291234 - DNA, 20 bp, synthetic construct
  source 1..20: mol_type = other DNA
cagctaattttttgtatttt

SEQ ID NO: 291235 - DNA, 20 bp, synthetic construct
  source 1..20: mol_type = other DNA
ccagctaattttttgtattt

SEQ ID NO: 291236 - DNA, 20 bp, synthetic construct
  source 1..20: mol_type = other DNA
cccagctaattttttgtatt

SEQ ID NO: 291237 - DNA, 20 bp, synthetic construct
  source 1..20: mol_type = other DNA
gcccagctaattttttgtat

SEQ ID NO: 291238 - DNA, 20 bp, synthetic construct
  source 1..20: mol_type = other DNA
cgcccagctaattttttgta

SEQ ID NO: 291239 - DNA, 20 bp, synthetic construct
  source 1..20: mol_type = other DNA
acgcccagctaattttttgt

SEQ ID NO: 291240 - DNA, 20 bp, synthetic construct
  source 1..20: mol_type = other DNA
cacgcccagctaattttttg

SEQ ID NO: 291241 - DNA, 20 bp, synthetic construct
  source 1..20: mol_type = other DNA
ccacgcccagctaatttttt

SEQ ID NO: 291242 - DNA, 20 bp, synthetic construct
  source 1..20: mol_type = other DNA
accacgcccagctaattttt

SEQ ID NO: 291243 - DNA, 20 bp, synthetic construct
  source 1..20: mol_type = other DNA
caccacgcccagctaatttt

SEQ ID NO: 291244 - DNA, 20 bp, synthetic construct
  source 1..20: mol_type = other DNA
ccaccacgcccagctaattt

SEQ ID NO: 291245 - DNA, 20 bp, synthetic construct
  source 1..20: mol_type = other DNA
gccaccacgcccagctaatt

SEQ ID NO: 291246 - DNA, 20 bp, synthetic construct
  source 1..20: mol_type = other DNA
tgccaccacgcccagctaat

SEQ ID NO: 291247 - DNA, 20 bp, synthetic construct
  source 1..20: mol_type = other DNA
ctgccaccacgcccagctaa

SEQ ID NO: 291248 - DNA, 20 bp, synthetic construct
  source 1..20: mol_type = other DNA
cctgccaccacgcccagcta

SEQ ID NO: 291249 - DNA, 20 bp, synthetic construct
  source 1..20: mol_type = other DNA
gcctgccaccacgcccagct

SEQ ID NO: 291250 - DNA, 20 bp, synthetic construct
  source 1..20: mol_type = other DNA
tgcctgccaccacgcccagc

SEQ ID NO: 291251 - DNA, 20 bp, synthetic construct
  source 1..20: mol_type = other DNA
gtgcctgccaccacgcccag

SEQ ID NO: 291252 - DNA, 20 bp, synthetic construct
  source 1..20: mol_type = other DNA
ggtgcctgccaccacgccca

SEQ ID NO: 291253 - DNA, 20 bp, synthetic construct
  source 1..20: mol_type = other DNA
aggtgcctgccaccacgccc

SEQ ID NO: 291254 - DNA, 20 bp, synthetic construct
  source 1..20: mol_type = other DNA
caggtgcctgccaccacgcc

SEQ ID NO: 291255 - DNA, 20 bp, synthetic construct
  source 1..20: mol_type = other DNA
acaggtgcctgccaccacgc

SEQ ID NO: 291256 - DNA, 20 bp, synthetic construct
  source 1..20: mol_type = other DNA
tacaggtgcctgccaccacg

SEQ ID NO: 291257 - DNA, 20 bp, synthetic construct
  source 1..20: mol_type = other DNA
ctacaggtgcctgccaccac

SEQ ID NO: 291258 - DNA, 20 bp, synthetic construct
  source 1..20: mol_type = other DNA
actacaggtgcctgccacca

SEQ ID NO: 291259 - DNA, 20 bp, synthetic construct
  source 1..20: mol_type = other DNA
gactacaggtgcctgccacc

SEQ ID NO: 291260 - DNA, 20 bp, synthetic construct
  source 1..20: mol_type = other DNA
ggactacaggtgcctgccac

SEQ ID NO: 291261 - DNA, 20 bp, synthetic construct
  source 1..20: mol_type = other DNA
gggactacaggtgcctgcca

SEQ ID NO: 291262 - DNA, 20 bp, synthetic construct
  source 1..20: mol_type = other DNA
tgggactacaggtgcctgcc

SEQ ID NO: 291263 - DNA, 20 bp, synthetic construct
  source 1..20: mol_type = other DNA
ctgggactacaggtgcctgc

SEQ ID NO: 291264 - DNA, 20 bp, synthetic construct
  source 1..20: mol_type = other DNA
gctgggactacaggtgcctg

SEQ ID NO: 291265 - DNA, 20 bp, synthetic construct
  source 1..20: mol_type = other DNA
ggctgggactacaggtgcct

SEQ ID NO: 291266 - DNA, 20 bp, synthetic construct
  source 1..20: mol_type = other DNA
tggctgggactacaggtgcc

SEQ ID NO: 291267 - DNA, 20 bp, synthetic construct
  source 1..20: mol_type = other DNA
gtggctgggactacaggtgc

SEQ ID NO: 291268 - DNA, 20 bp, synthetic construct
  source 1..20: mol_type = other DNA
agtggctgggactacaggtg

SEQ ID NO: 291269 - DNA, 20 bp, synthetic construct
  source 1..20: mol_type = other DNA
gagtggctgggactacaggt

SEQ ID NO: 291270 - DNA, 20 bp, synthetic construct
  source 1..20: mol_type = other DNA
cgagtggctgggactacagg

SEQ ID NO: 291271 - DNA, 20 bp, synthetic construct
  source 1..20: mol_type = other DNA
ccgagtggctgggactacag

SEQ ID NO: 291272 - DNA, 20 bp, synthetic construct
  source 1..20: mol_type = other DNA
accgagtggctgggactaca

SEQ ID NO: 291273 - DNA, 20 bp, synthetic construct
  source 1..20: mol_type = other DNA
aaccgagtggctgggactac

SEQ ID NO: 291274 - DNA, 20 bp, synthetic construct
  source 1..20: mol_type = other DNA
caaccgagtggctgggacta

SEQ ID NO: 291275 - DNA, 20 bp, synthetic construct
  source 1..20: mol_type = other DNA
ccaaccgagtggctgggact

SEQ ID NO: 291276 - DNA, 20 bp, synthetic construct
  source 1..20: mol_type = other DNA
gccaaccgagtggctgggac

SEQ ID NO: 291277 - DNA, 20 bp, synthetic construct
  source 1..20: mol_type = other DNA
agccaaccgagtggctggga

SEQ ID NO: 291278 - DNA, 20 bp, synthetic construct
  source 1..20: mol_type = other DNA
cagccaaccgagtggctggg

SEQ ID NO: 291279 - DNA, 20 bp, synthetic construct
  source 1..20: mol_type = other DNA
tcagccaaccgagtggctgg

SEQ ID NO: 291280 - DNA, 20 bp, synthetic construct
  source 1..20: mol_type = other DNA
ctcagccaaccgagtggctg

SEQ ID NO: 291281 - DNA, 20 bp, synthetic construct
  source 1..20: mol_type = other DNA
cctcagccaaccgagtggct

SEQ ID NO: 291282 - DNA, 20 bp, synthetic construct
  source 1..20: mol_type = other DNA
gcctcagccaaccgagtggc

SEQ ID NO: 291283 - DNA, 20 bp, synthetic construct
  source 1..20: mol_type = other DNA
tgcctcagccaaccgagtgg

SEQ ID NO: 291284 - DNA, 20 bp, synthetic construct
  source 1..20: mol_type = other DNA
ctgcctcagccaaccgagtg

SEQ ID NO: 291285 - DNA, 20 bp, synthetic construct
  source 1..20: mol_type = other DNA
cctgcctcagccaaccgagt

SEQ ID NO: 291286 - DNA, 20 bp, synthetic construct
  source 1..20: mol_type = other DNA
tcctgcctcagccaaccgag

SEQ ID NO: 291287 - DNA, 20 bp, synthetic construct
  source 1..20: mol_type = other DNA
ctcctgcctcagccaaccga

SEQ ID NO: 291288 - DNA, 20 bp, synthetic construct
  source 1..20: mol_type = other DNA
tctcctgcctcagccaaccg

SEQ ID NO: 291289 - DNA, 20 bp, synthetic construct
  source 1..20: mol_type = other DNA
ttctcctgcctcagccaacc

SEQ ID NO: 291290 - DNA, 20 bp, synthetic construct
  source 1..20: mol_type = other DNA
attctcctgcctcagccaac

SEQ ID NO: 291291 - DNA, 20 bp, synthetic construct
  source 1..20: mol_type = other DNA
cattctcctgcctcagccaa

SEQ ID NO: 291292 - DNA, 20 bp, synthetic construct
  source 1..20: mol_type = other DNA
ccattctcctgcctcagcca

SEQ ID NO: 291293 - DNA, 20 bp, synthetic construct
  source 1..20: mol_type = other DNA
gccattctcctgcctcagcc

SEQ ID NO: 291294 - DNA, 20 bp, synthetic construct
  source 1..20: mol_type = other DNA
tgccattctcctgcctcagc

SEQ ID NO: 291295 - DNA, 20 bp, synthetic construct
  source 1..20: mol_type = other DNA
atgccattctcctgcctcag

SEQ ID NO: 291296 - DNA, 20 bp, synthetic construct
  source 1..20: mol_type = other DNA
catgccattctcctgcctca

SEQ ID NO: 291297 - DNA, 20 bp, synthetic construct
  source 1..20: mol_type = other DNA
tcatgccattctcctgcctc

SEQ ID NO: 291298 - DNA, 20 bp, synthetic construct
  source 1..20: mol_type = other DNA
ttcatgccattctcctgcct

SEQ ID NO: 291299 - DNA, 20 bp, synthetic construct
  source 1..20: mol_type = other DNA
gttcatgccattctcctgcc

SEQ ID NO: 291300 - DNA, 20 bp, synthetic construct
  source 1..20: mol_type = other DNA
ggttcatgccattctcctgc

SEQ ID NO: 291301 - DNA, 20 bp, synthetic construct
  source 1..20: mol_type = other DNA
gggttcatgccattctcctg

SEQ ID NO: 291302 - DNA, 20 bp, synthetic construct
  source 1..20: mol_type = other DNA
cgggttcatgccattctcct

SEQ ID NO: 291303 - DNA, 20 bp, synthetic construct
  source 1..20: mol_type = other DNA
ccgggttcatgccattctcc

SEQ ID NO: 291304 - DNA, 20 bp, synthetic construct
  source 1..20: mol_type = other DNA
cccgggttcatgccattctc

SEQ ID NO: 291305 - DNA, 20 bp, synthetic construct
  source 1..20: mol_type = other DNA
tcccgggttcatgccattct

SEQ ID NO: 291306 - DNA, 20 bp, synthetic construct
  source 1..20: mol_type = other DNA
ctcccgggttcatgccattc

SEQ ID NO: 291307 - DNA, 20 bp, synthetic construct
  source 1..20: mol_type = other DNA
cctcccgggttcatgccatt

SEQ ID NO: 291308 - DNA, 20 bp, synthetic construct
  source 1..20: mol_type = other DNA
gcctcccgggttcatgccat

SEQ ID NO: 291309 - DNA, 20 bp, synthetic construct
  source 1..20: mol_type = other DNA
cgcctcccgggttcatgcca

SEQ ID NO: 291310 - DNA, 20 bp, synthetic construct
  source 1..20: mol_type = other DNA
ccgcctcccgggttcatgcc

SEQ ID NO: 291311 - DNA, 20 bp, synthetic construct
  source 1..20: mol_type = other DNA
tccgcctcccgggttcatgc

SEQ ID NO: 291312 - DNA, 20 bp, synthetic construct
  source 1..20: mol_type = other DNA
ctccgcctcccgggttcatg

SEQ ID NO: 291313 - DNA, 20 bp, synthetic construct
  source 1..20: mol_type = other DNA
gctccgcctcccgggttcat

SEQ ID NO: 291314 - DNA, 20 bp, synthetic construct
  source 1..20: mol_type = other DNA
agctccgcctcccgggttca

SEQ ID NO: 291315 - DNA, 20 bp, synthetic construct
  source 1..20: mol_type = other DNA
aagctccgcctcccgggttc

SEQ ID NO: 291316 - DNA, 20 bp, synthetic construct
  source 1..20: mol_type = other DNA
caagctccgcctcccgggtt

SEQ ID NO: 291317 - DNA, 20 bp, synthetic construct
  source 1..20: mol_type = other DNA
gcaagctccgcctcccgggt

SEQ ID NO: 291318 - DNA, 20 bp, synthetic construct
  source 1..20: mol_type = other DNA
tgcaagctccgcctcccggg

SEQ ID NO: 291319 - DNA, 20 bp, synthetic construct
  source 1..20: mol_type = other DNA
ctgcaagctccgcctcccgg

SEQ ID NO: 291320 - DNA, 20 bp, synthetic construct
  source 1..20: mol_type = other DNA
actgcaagctccgcctcccg

SEQ ID NO: 291321 - DNA, 20 bp, synthetic construct
  source 1..20: mol_type = other DNA
cactgcaagctccgcctccc

SEQ ID NO: 291322 - DNA, 20 bp, synthetic construct
  source 1..20: mol_type = other DNA
tcactgcaagctccgcctcc

SEQ ID NO: 291323 - DNA, 20 bp, synthetic construct
  source 1..20: mol_type = other DNA
ctcactgcaagctccgcctc

SEQ ID NO: 291324 - DNA, 20 bp, synthetic construct
  source 1..20: mol_type = other DNA
gctcactgcaagctccgcct

SEQ ID NO: 291325 - DNA, 20 bp, synthetic construct
  source 1..20: mol_type = other DNA
tgctcactgcaagctccgcc

SEQ ID NO: 291326 - DNA, 20 bp, synthetic construct
  source 1..20: mol_type = other DNA
ctgctcactgcaagctccgc

SEQ ID NO: 291327 - DNA, 20 bp, synthetic construct
  source 1..20: mol_type = other DNA
tctgctcactgcaagctccg

SEQ ID NO: 291328 - DNA, 20 bp, synthetic construct
  source 1..20: mol_type = other DNA
ctctgctcactgcaagctcc

SEQ ID NO: 291329 - DNA, 20 bp, synthetic construct
  source 1..20: mol_type = other DNA
tctctgctcactgcaagctc

SEQ ID NO: 291330 - DNA, 20 bp, synthetic construct
  source 1..20: mol_type = other DNA
gtctctgctcactgcaagct

SEQ ID NO: 291331 - DNA, 20 bp, synthetic construct
  source 1..20: mol_type = other DNA
ggtctctgctcactgcaagc

SEQ ID NO: 291332 - DNA, 20 bp, synthetic construct
  source 1..20: mol_type = other DNA
tggtctctgctcactgcaag

SEQ ID NO: 291333 - DNA, 20 bp, synthetic construct
  source 1..20: mol_type = other DNA
atggtctctgctcactgcaa

SEQ ID NO: 291334 - DNA, 20 bp, synthetic construct
  source 1..20: mol_type = other DNA
catggtctctgctcactgca

SEQ ID NO: 291335 - DNA, 20 bp, synthetic construct
  source 1..20: mol_type = other DNA
gcatggtctctgctcactgc

SEQ ID NO: 291336 - DNA, 20 bp, synthetic construct
  source 1..20: mol_type = other DNA
ggcatggtctctgctcactg

SEQ ID NO: 291337 - DNA, 20 bp, synthetic construct
  source 1..20: mol_type = other DNA
tggcatggtctctgctcact

SEQ ID NO: 291338 - DNA, 20 bp, synthetic construct
  source 1..20: mol_type = other DNA
gtggcatggtctctgctcac

SEQ ID NO: 291339 - DNA, 20 bp, synthetic construct
  source 1..20: mol_type = other DNA
agtggcatggtctctgctca

SEQ ID NO: 291340 - DNA, 20 bp, synthetic construct
  source 1..20: mol_type = other DNA
cagtggcatggtctctgctc

SEQ ID NO: 291341 - DNA, 20 bp, synthetic construct
  source 1..20: mol_type = other DNA
gcagtggcatggtctctgct

SEQ ID NO: 291342 - DNA, 20 bp, synthetic construct
  source 1..20: mol_type = other DNA
tgcagtggcatggtctctgc

SEQ ID NO: 291343 - DNA, 20 bp, synthetic construct
  source 1..20: mol_type = other DNA
gtgcagtggcatggtctctg

SEQ ID NO: 291344 - DNA, 20 bp, synthetic construct
  source 1..20: mol_type = other DNA
agtgcagtggcatggtctct

SEQ ID NO: 291345 - DNA, 20 bp, synthetic construct
  source 1..20: mol_type = other DNA
gagtgcagtggcatggtctc

SEQ ID NO: 291346 - DNA, 20 bp, synthetic construct
  source 1..20: mol_type = other DNA
ggagtgcagtggcatggtct

SEQ ID NO: 291347 - DNA, 20 bp, synthetic construct
  source 1..20: mol_type = other DNA
tggagtgcagtggcatggtc

SEQ ID NO: 291348 - DNA, 20 bp, synthetic construct
  source 1..20: mol_type = other DNA
ctggagtgcagtggcatggt

SEQ ID NO: 291349 - DNA, 20 bp, synthetic construct
  source 1..20: mol_type = other DNA
gctggagtgcagtggcatgg

SEQ ID NO: 291350 - DNA, 20 bp, synthetic construct
  source 1..20: mol_type = other DNA
ggctggagtgcagtggcatg

SEQ ID NO: 291351 - DNA, 20 bp, synthetic construct
  source 1..20: mol_type = other DNA
aggctggagtgcagtggcat

SEQ ID NO: 291352 - DNA, 20 bp, synthetic construct
  source 1..20: mol_type = other DNA
caggctggagtgcagtggca

SEQ ID NO: 291353 - DNA, 20 bp, synthetic construct
  source 1..20: mol_type = other DNA
ccaggctggagtgcagtggc

SEQ ID NO: 291354 - DNA, 20 bp, synthetic construct
  source 1..20: mol_type = other DNA
cccaggctggagtgcagtgg

SEQ ID NO: 291355 - DNA, 20 bp, synthetic construct
  source 1..20: mol_type = other DNA
gcccaggctggagtgcagtg

SEQ ID NO: 291356 - DNA, 20 bp, synthetic construct
  source 1..20: mol_type = other DNA
cgcccaggctggagtgcagt

SEQ ID NO: 291357 - DNA, 20 bp, synthetic construct
  source 1..20: mol_type = other DNA
tcgcccaggctggagtgcag

SEQ ID NO: 291358 - DNA, 20 bp, synthetic construct
  source 1..20: mol_type = other DNA
gtcgcccaggctggagtgca

SEQ ID NO: 291359 - DNA, 20 bp, synthetic construct
  source 1..20: mol_type = other DNA
tgtcgcccaggctggagtgc

SEQ ID NO: 291360 - DNA, 20 bp, synthetic construct
  source 1..20: mol_type = other DNA
ctgtcgcccaggctggagtg

SEQ ID NO: 291361 - DNA, 20 bp, synthetic construct
  source 1..20: mol_type = other DNA
tctgtcgcccaggctggagt

SEQ ID NO: 291362 - DNA, 20 bp, synthetic construct
  source 1..20: mol_type = other DNA
ctctgtcgcccaggctggag

SEQ ID NO: 291363 - DNA, 20 bp, synthetic construct
  source 1..20: mol_type = other DNA
gctctgtcgcccaggctgga

SEQ ID NO: 291364 - DNA, 20 bp, synthetic construct
  source 1..20: mol_type = other DNA
tgctctgtcgcccaggctgg

SEQ ID NO: 291365 - DNA, 20 bp, synthetic construct
  source 1..20: mol_type = other DNA
ttgctctgtcgcccaggctg

SEQ ID NO: 291366 - DNA, 20 bp, synthetic construct
  source 1..20: mol_type = other DNA
cttgctctgtcgcccaggct

SEQ ID NO: 291367 - DNA, 20 bp, synthetic construct
  source 1..20: mol_type = other DNA
tcttgctctgtcgcccaggc

SEQ ID NO: 291368 - DNA, 20 bp, synthetic construct
  source 1..20: mol_type = other DNA
gtcttgctctgtcgcccagg

SEQ ID NO: 291369 - DNA, 20 bp, synthetic construct
  source 1..20: mol_type = other DNA
agtcttgctctgtcgcccag

SEQ ID NO: 291370 - DNA, 20 bp, synthetic construct
  source 1..20: mol_type = other DNA
gagtcttgctctgtcgccca

SEQ ID NO: 291371 - DNA, 20 bp, synthetic construct
  source 1..20: mol_type = other DNA
agagtcttgctctgtcgccc

SEQ ID NO: 291372 - DNA, 20 bp, synthetic construct
  source 1..20: mol_type = other DNA
cagagtcttgctctgtcgcc

SEQ ID NO: 291373 - DNA, 20 bp, synthetic construct
  source 1..20: mol_type = other DNA
acagagtcttgctctgtcgc

SEQ ID NO: 291374 - DNA, 20 bp, synthetic construct
  source 1..20: mol_type = other DNA
gacagagtcttgctctgtcg

SEQ ID NO: 291375 - DNA, 20 bp, synthetic construct
  source 1..20: mol_type = other DNA
agacagagtcttgctctgtc

SEQ ID NO: 291376 - DNA, 20 bp, synthetic construct
  source 1..20: mol_type = other DNA
gagacagagtcttgctctgt

SEQ ID NO: 291377 - DNA, 20 bp, synthetic construct
  source 1..20: mol_type = other DNA
tgagacagagtcttgctctg

SEQ ID NO: 291378 - DNA, 20 bp, synthetic construct
  source 1..20: mol_type = other DNA
ttgagacagagtcttgctct

SEQ ID NO: 291379 - DNA, 20 bp, synthetic construct
  source 1..20: mol_type = other DNA
cttgagacagagtcttgctc

SEQ ID NO: 291380 - DNA, 20 bp, synthetic construct
  source 1..20: mol_type = other DNA
tcttgagacagagtcttgct

SEQ ID NO: 291381 - DNA, 20 bp, synthetic construct
  source 1..20: mol_type = other DNA
ttcttgagacagagtcttgc

SEQ ID NO: 291382 - DNA, 20 bp, synthetic construct
  source 1..20: mol_type = other DNA
tttcttgagacagagtcttg

SEQ ID NO: 291383 - DNA, 20 bp, synthetic construct
  source 1..20: mol_type = other DNA
ttttcttgagacagagtctt

SEQ ID NO: 291384 - DNA, 20 bp, synthetic construct
  source 1..20: mol_type = other DNA
tttttcttgagacagagtct

SEQ ID NO: 291385 - DNA, 20 bp, synthetic construct
  source 1..20: mol_type = other DNA
ttttttcttgagacagagtc

SEQ ID NO: 291386 - DNA, 20 bp, synthetic construct
  source 1..20: mol_type = other DNA
tttttttcttgagacagagt

SEQ ID NO: 291387 - DNA, 20 bp, synthetic construct
  source 1..20: mol_type = other DNA
ttttttttcttgagacagag

SEQ ID NO: 291388 - DNA, 20 bp, synthetic construct
  source 1..20: mol_type = other DNA
tttttttttcttgagacaga

SEQ ID NO: 291389 - DNA, 20 bp, synthetic construct
  source 1..20: mol_type = other DNA
ttttttttttcttgagacag

SEQ ID NO: 291390 - DNA, 20 bp, synthetic construct
  source 1..20: mol_type = other DNA
tttttttttttcttgagaca

SEQ ID NO: 291391 - DNA, 20 bp, synthetic construct
  source 1..20: mol_type = other DNA
ttttttttttttcttgagac

SEQ ID NO: 291392 - DNA, 20 bp, synthetic construct
  source 1..20: mol_type = other DNA
tttttttttttttcttgaga

SEQ ID NO: 291393 - DNA, 20 bp, synthetic construct
  source 1..20: mol_type = other DNA
ttttttttttttttcttgag

SEQ ID NO: 291394 - DNA, 20 bp, synthetic construct
  source 1..20: mol_type = other DNA
tttttttttttttttcttga

SEQ ID NO: 291395 - DNA, 20 bp, synthetic construct
  source 1..20: mol_type = other DNA
ttttttttttttttttcttg

SEQ ID NO: 291396 - DNA, 20 bp, synthetic construct
  source 1..20: mol_type = other DNA
gttttttttttttttttctt

SEQ ID NO: 291397 - DNA, 20 bp, synthetic construct
  source 1..20: mol_type = other DNA
tgttttttttttttttttct

SEQ ID NO: 291398 - DNA, 20 bp, synthetic construct
  source 1..20: mol_type = other DNA
ctgttttttttttttttttc

SEQ ID NO: 291399 - DNA, 20 bp, synthetic construct
  source 1..20: mol_type = other DNA
tctgtttttttttttttttt

SEQ ID NO: 291400 - DNA, 20 bp, synthetic construct
  source 1..20: mol_type = other DNA
gtctgttttttttttttttt

SEQ ID NO: 291401 - DNA, 20 bp, synthetic construct
  source 1..20: mol_type = other DNA
agtctgtttttttttttttt

SEQ ID NO: 291402 - DNA, 20 bp, synthetic construct
  source 1..20: mol_type = other DNA
aagtctgttttttttttttt

SEQ ID NO: 291403 - DNA, 20 bp, synthetic construct
  source 1..20: mol_type = other DNA
aaagtctgtttttttttttt

SEQ ID NO: 291404 - DNA, 20 bp, synthetic construct
  source 1..20: mol_type = other DNA
taaagtctgttttttttttt

SEQ ID NO: 291405 - DNA, 20 bp, synthetic construct
  source 1..20: mol_type = other DNA
gtaaagtctgtttttttttt

SEQ ID NO: 291406 - DNA, 20 bp, synthetic construct
  source 1..20: mol_type = other DNA
agtaaagtctgttttttttt

SEQ ID NO: 291407 - DNA, 20 bp, synthetic construct
  source 1..20: mol_type = other DNA
aagtaaagtctgtttttttt

SEQ ID NO: 291408 - DNA, 20 bp, synthetic construct
  source 1..20: mol_type = other DNA
taagtaaagtctgttttttt

SEQ ID NO: 291409 - DNA, 20 bp, synthetic construct
  source 1..20: mol_type = other DNA
gtaagtaaagtctgtttttt

SEQ ID NO: 291410 - DNA, 20 bp, synthetic construct
  source 1..20: mol_type = other DNA
agtaagtaaagtctgttttt

SEQ ID NO: 291411 - DNA, 20 bp, synthetic construct
  source 1..20: mol_type = other DNA
cagtaagtaaagtctgtttt

SEQ ID NO: 291412 - DNA, 20 bp, synthetic construct
  source 1..20: mol_type = other DNA
ccagtaagtaaagtctgttt

SEQ ID NO: 291413 - DNA, 20 bp, synthetic construct
  source 1..20: mol_type = other DNA
tccagtaagtaaagtctgtt

SEQ ID NO: 291414 - DNA, 20 bp, synthetic construct
  source 1..20: mol_type = other DNA
ttccagtaagtaaagtctgt

SEQ ID NO: 291415 - DNA, 20 bp, synthetic construct
  source 1..20: mol_type = other DNA
cttccagtaagtaaagtctg

SEQ ID NO: 291416 - DNA, 20 bp, synthetic construct
  source 1..20: mol_type = other DNA
gcttccagtaagtaaagtct

SEQ ID NO: 291417 - DNA, 20 bp, synthetic construct
  source 1..20: mol_type = other DNA
ggcttccagtaagtaaagtc

SEQ ID NO: 291418 - DNA, 20 bp, synthetic construct
  source 1..20: mol_type = other DNA
tggcttccagtaagtaaagt

SEQ ID NO: 291419 - DNA, 20 bp, synthetic construct
  source 1..20: mol_type = other DNA
ttggcttccagtaagtaaag

SEQ ID NO: 291420 - DNA, 20 bp, synthetic construct
  source 1..20: mol_type = other DNA
gttggcttccagtaagtaaa

SEQ ID NO: 291421 - DNA, 20 bp, synthetic construct
  source 1..20: mol_type = other DNA
ggttggcttccagtaagtaa

SEQ ID NO: 291422 - DNA, 20 bp, synthetic construct
  source 1..20: mol_type = other DNA
tggttggcttccagtaagta

SEQ ID NO: 291423 - DNA, 20 bp, synthetic construct
  source 1..20: mol_type = other DNA
ttggttggcttccagtaagt

SEQ ID NO: 291424 - DNA, 20 bp, synthetic construct
  source 1..20: mol_type = other DNA
attggttggcttccagtaag

SEQ ID NO: 291425 - DNA, 20 bp, synthetic construct
  source 1..20: mol_type = other DNA
cattggttggcttccagtaa

SEQ ID NO: 291426 - DNA, 20 bp, synthetic construct
  source 1..20: mol_type = other DNA
acattggttggcttccagta

SEQ ID NO: 291427 - DNA, 20 bp, synthetic construct
  source 1..20: mol_type = other DNA
tacattggttggcttccagt

SEQ ID NO: 291428 - DNA, 20 bp, synthetic construct
  source 1..20: mol_type = other DNA
atacattggttggcttccag

SEQ ID NO: 291429 - DNA, 20 bp, synthetic construct
  source 1..20: mol_type = other DNA
tatacattggttggcttcca

SEQ ID NO: 291430 - DNA, 20 bp, synthetic construct
  source 1..20: mol_type = other DNA
atatacattggttggcttcc

SEQ ID NO: 291431 - DNA, 20 bp, synthetic construct
  source 1..20: mol_type = other DNA
aatatacattggttggcttc

SEQ ID NO: 291432 - DNA, 20 bp, synthetic construct
  source 1..20: mol_type = other DNA
aaatatacattggttggctt

SEQ ID NO: 291433 - DNA, 20 bp, synthetic construct
  source 1..20: mol_type = other DNA
taaatatacattggttggct

SEQ ID NO: 291434 - DNA, 20 bp, synthetic construct
  source 1..20: mol_type = other DNA
ctaaatatacattggttggc

SEQ ID NO: 291435 - DNA, 20 bp, synthetic construct
  source 1..20: mol_type = other DNA
tctaaatatacattggttgg

SEQ ID NO: 291436 - DNA, 20 bp, synthetic construct
  source 1..20: mol_type = other DNA
ctctaaatatacattggttg

SEQ ID NO: 291437 - DNA, 20 bp, synthetic construct
  source 1..20: mol_type = other DNA
actctaaatatacattggtt

SEQ ID NO: 291438 - DNA, 20 bp, synthetic construct
  source 1..20: mol_type = other DNA
tactctaaatatacattggt

SEQ ID NO: 291439 - DNA, 20 bp, synthetic construct
  source 1..20: mol_type = other DNA
ttactctaaatatacattgg

SEQ ID NO: 291440 - DNA, 20 bp, synthetic construct
  source 1..20: mol_type = other DNA
attactctaaatatacattg

SEQ ID NO: 291441 - DNA, 20 bp, synthetic construct
  source 1..20: mol_type = other DNA
aattactctaaatatacatt

SEQ ID NO: 291442 - DNA, 20 bp, synthetic construct
  source 1..20: mol_type = other DNA
aaattactctaaatatacat

SEQ ID NO: 291443 - DNA, 20 bp, synthetic construct
  source 1..20: mol_type = other DNA
aaaattactctaaatataca

SEQ ID NO: 291444 - DNA, 20 bp, synthetic construct
  source 1..20: mol_type = other DNA
aaaaattactctaaatatac

SEQ ID NO: 291445 - DNA, 20 bp, synthetic construct
  source 1..20: mol_type = other DNA
gaaaaattactctaaatata

SEQ ID NO: 291446 - DNA, 20 bp, synthetic construct
  source 1..20: mol_type = other DNA
ggaaaaattactctaaatat

SEQ ID NO: 291447 - DNA, 20 bp, synthetic construct
  source 1..20: mol_type = other DNA
aggaaaaattactctaaata

SEQ ID NO: 291448 - DNA, 20 bp, synthetic construct
  source 1..20: mol_type = other DNA
caggaaaaattactctaaat

SEQ ID NO: 291449 - DNA, 20 bp, synthetic construct
  source 1..20: mol_type = other DNA
ccaggaaaaattactctaaa

SEQ ID NO: 291450 - DNA, 20 bp, synthetic construct
  source 1..20: mol_type = other DNA
cccaggaaaaattactctaa

SEQ ID NO: 291451 - DNA, 20 bp, synthetic construct
  source 1..20: mol_type = other DNA
gcccaggaaaaattactcta

SEQ ID NO: 291452 - DNA, 20 bp, synthetic construct
  source 1..20: mol_type = other DNA
agcccaggaaaaattactct

SEQ ID NO: 291453 - DNA, 20 bp, synthetic construct
  source 1..20: mol_type = other DNA
cagcccaggaaaaattactc

SEQ ID NO: 291454 - DNA, 20 bp, synthetic construct
  source 1..20: mol_type = other DNA
tcagcccaggaaaaattact

SEQ ID NO: 291455 - DNA, 20 bp, synthetic construct
  source 1..20: mol_type = other DNA
ctcagcccaggaaaaattac

SEQ ID NO: 291456 - DNA, 20 bp, synthetic construct
  source 1..20: mol_type = other DNA
gctcagcccaggaaaaatta

SEQ ID NO: 291457 - DNA, 20 bp, synthetic construct
  source 1..20: mol_type = other DNA
agctcagcccaggaaaaatt

SEQ ID NO: 291458 - DNA, 20 bp, synthetic construct
  source 1..20: mol_type = other DNA
cagctcagcccaggaaaaat

SEQ ID NO: 291459 - DNA, 20 bp, synthetic construct
  source 1..20: mol_type = other DNA
acagctcagcccaggaaaaa

SEQ ID NO: 291460 - DNA, 20 bp, synthetic construct
  source 1..20: mol_type = other DNA
gacagctcagcccaggaaaa

SEQ ID NO: 291461 - DNA, 20 bp, synthetic construct
  source 1..20: mol_type = other DNA
tgacagctcagcccaggaaa

SEQ ID NO: 291462 - DNA, 20 bp, synthetic construct
  source 1..20: mol_type = other DNA
atgacagctcagcccaggaa

SEQ ID NO: 291463 - DNA, 20 bp, synthetic construct
  source 1..20: mol_type = other DNA
aatgacagctcagcccagga

SEQ ID NO: 291464 - DNA, 20 bp, synthetic construct
  source 1..20: mol_type = other DNA
aaatgacagctcagcccagg

SEQ ID NO: 291465 - DNA, 20 bp, synthetic construct
  source 1..20: mol_type = other DNA
taaatgacagctcagcccag

SEQ ID NO: 291466 - DNA, 20 bp, synthetic construct
  source 1..20: mol_type = other DNA
gtaaatgacagctcagccca

SEQ ID NO: 291467 - DNA, 20 bp, synthetic construct
  source 1..20: mol_type = other DNA
agtaaatgacagctcagccc

SEQ ID NO: 291468 - DNA, 20 bp, synthetic construct
  source 1..20: mol_type = other DNA
aagtaaatgacagctcagcc

SEQ ID NO: 291469 - DNA, 20 bp, synthetic construct
  source 1..20: mol_type = other DNA
aaagtaaatgacagctcagc

SEQ ID NO: 291470 - DNA, 20 bp, synthetic construct
  source 1..20: mol_type = other DNA
aaaagtaaatgacagctcag

SEQ ID NO: 291471 - DNA, 20 bp, synthetic construct
  source 1..20: mol_type = other DNA
caaaagtaaatgacagctca

SEQ ID NO: 291472 - DNA, 20 bp, synthetic construct
  source 1..20: mol_type = other DNA
gcaaaagtaaatgacagctc

SEQ ID NO: 291473 - DNA, 20 bp, synthetic construct
  source 1..20: mol_type = other DNA
tgcaaaagtaaatgacagct

SEQ ID NO: 291474 - DNA, 20 bp, synthetic construct
  source 1..20: mol_type = other DNA
ctgcaaaagtaaatgacagc

SEQ ID NO: 291475 - DNA, 20 bp, synthetic construct
  source 1..20: mol_type = other DNA
actgcaaaagtaaatgacag

SEQ ID NO: 291476 - DNA, 20 bp, synthetic construct
  source 1..20: mol_type = other DNA
tactgcaaaagtaaatgaca

SEQ ID NO: 291477 - DNA, 20 bp, synthetic construct
  source 1..20: mol_type = other DNA
atactgcaaaagtaaatgac

SEQ ID NO: 291478 - DNA, 20 bp, synthetic construct
  source 1..20: mol_type = other DNA
gatactgcaaaagtaaatga

SEQ ID NO: 291479 - DNA, 20 bp, synthetic construct
  source 1..20: mol_type = other DNA
agatactgcaaaagtaaatg

SEQ ID NO: 291480 - DNA, 20 bp, synthetic construct
  source 1..20: mol_type = other DNA
gagatactgcaaaagtaaat

SEQ ID NO: 291481 - DNA, 20 bp, synthetic construct
  source 1..20: mol_type = other DNA
tgagatactgcaaaagtaaa

SEQ ID NO: 291482 - DNA, 20 bp, synthetic construct
  source 1..20: mol_type = other DNA
ttgagatactgcaaaagtaa

SEQ ID NO: 291483 - DNA, 20 bp, synthetic construct
  source 1..20: mol_type = other DNA
cttgagatactgcaaaagta

SEQ ID NO: 291484 - DNA, 20 bp, synthetic construct
  source 1..20: mol_type = other DNA
tcttgagatactgcaaaagt

SEQ ID NO: 291485 - DNA, 20 bp, synthetic construct
  source 1..20: mol_type = other DNA
ttcttgagatactgcaaaag

SEQ ID NO: 291486 - DNA, 20 bp, synthetic construct
  source 1..20: mol_type = other DNA
cttcttgagatactgcaaaa

SEQ ID NO: 291487 - DNA, 20 bp, synthetic construct
  source 1..20: mol_type = other DNA
tcttcttgagatactgcaaa

SEQ ID NO: 291488 - DNA, 20 bp, synthetic construct
  source 1..20: mol_type = other DNA
ttcttcttgagatactgcaa

SEQ ID NO: 291489 - DNA, 20 bp, synthetic construct
  source 1..20: mol_type = other DNA
cttcttcttgagatactgca

SEQ ID NO: 291490 - DNA, 20 bp, synthetic construct
  source 1..20: mol_type = other DNA
tcttcttcttgagatactgc

SEQ ID NO: 291491 - DNA, 20 bp, synthetic construct
  source 1..20: mol_type = other DNA
ctcttcttcttgagatactg

SEQ ID NO: 291492 - DNA, 20 bp, synthetic construct
  source 1..20: mol_type = other DNA
actcttcttcttgagatact

SEQ ID NO: 291493 - DNA, 20 bp, synthetic construct
  source 1..20: mol_type = other DNA
aactcttcttcttgagatac

SEQ ID NO: 291494 - DNA, 20 bp, synthetic construct
  source 1..20: mol_type = other DNA
aaactcttcttcttgagata

SEQ ID NO: 291495 - DNA, 20 bp, synthetic construct
  source 1..20: mol_type = other DNA
taaactcttcttcttgagat

SEQ ID NO: 291496 - DNA, 20 bp, synthetic construct
  source 1..20: mol_type = other DNA
gtaaactcttcttcttgaga

SEQ ID NO: 291497 - DNA, 20 bp, synthetic construct
  source 1..20: mol_type = other DNA
tgtaaactcttcttcttgag

SEQ ID NO: 291498 - DNA, 20 bp, synthetic construct
  source 1..20: mol_type = other DNA
ctgtaaactcttcttcttga

SEQ ID NO: 291499 - DNA, 20 bp, synthetic construct
  source 1..20: mol_type = other DNA
actgtaaactcttcttcttg

SEQ ID NO: 291500 - DNA, 20 bp, synthetic construct
  source 1..20: mol_type = other DNA
cactgtaaactcttcttctt

SEQ ID NO: 291501 - DNA, 20 bp, synthetic construct
  source 1..20: mol_type = other DNA
acactgtaaactcttcttct

SEQ ID NO: 291502 - DNA, 20 bp, synthetic construct
  source 1..20: mol_type = other DNA
tacactgtaaactcttcttc

SEQ ID NO: 291503 - DNA, 20 bp, synthetic construct
  source 1..20: mol_type = other DNA
ttacactgtaaactcttctt

SEQ ID NO: 291504 - DNA, 20 bp, synthetic construct
  source 1..20: mol_type = other DNA
tttacactgtaaactcttct

SEQ ID NO: 291505 - DNA, 20 bp, synthetic construct
  source 1..20: mol_type = other DNA
atttacactgtaaactcttc

SEQ ID NO: 291506 - DNA, 20 bp, synthetic construct
  source 1..20: mol_type = other DNA
tatttacactgtaaactctt

SEQ ID NO: 291507 - DNA, 20 bp, synthetic construct
  source 1..20: mol_type = other DNA
atatttacactgtaaactct

SEQ ID NO: 291508 - DNA, 20 bp, synthetic construct
  source 1..20: mol_type = other DNA
aatatttacactgtaaactc

SEQ ID NO: 291509 - DNA, 20 bp, synthetic construct
  source 1..20: mol_type = other DNA
aaatatttacactgtaaact

SEQ ID NO: 291510 - DNA, 20 bp, synthetic construct
  source 1..20: mol_type = other DNA
caaatatttacactgtaaac

SEQ ID NO: 291511 - DNA, 20 bp, synthetic construct
  source 1..20: mol_type = other DNA
tcaaatatttacactgtaaa

SEQ ID NO: 291512 - DNA, 20 bp, synthetic construct
  source 1..20: mol_type = other DNA
atcaaatatttacactgtaa

SEQ ID NO: 291513 - DNA, 20 bp, synthetic construct
  source 1..20: mol_type = other DNA
catcaaatatttacactgta

SEQ ID NO: 291514 - DNA, 20 bp, synthetic construct
  source 1..20: mol_type = other DNA
gcatcaaatatttacactgt

SEQ ID NO: 291515 - DNA, 20 bp, synthetic construct
  source 1..20: mol_type = other DNA
tgcatcaaatatttacactg

SEQ ID NO: 291516 - DNA, 20 bp, synthetic construct
  source 1..20: mol_type = other DNA
gtgcatcaaatatttacact

SEQ ID NO: 291517 - DNA, 20 bp, synthetic construct
  source 1..20: mol_type = other DNA
tgtgcatcaaatatttacac

SEQ ID NO: 291518 - DNA, 20 bp, synthetic construct
  source 1..20: mol_type = other DNA
gtgtgcatcaaatatttaca

SEQ ID NO: 291519 - DNA, 20 bp, synthetic construct
  source 1..20: mol_type = other DNA
agtgtgcatcaaatatttac

SEQ ID NO: 291520 - DNA, 20 bp, synthetic construct
  source 1..20: mol_type = other DNA
aagtgtgcatcaaatattta

SEQ ID NO: 291521 - DNA, 20 bp, synthetic construct
  source 1..20: mol_type = other DNA
aaagtgtgcatcaaatattt

SEQ ID NO: 291522 - DNA, 20 bp, synthetic construct
  source 1..20: mol_type = other DNA
caaagtgtgcatcaaatatt

SEQ ID NO: 291523 - DNA, 20 bp, synthetic construct
  source 1..20: mol_type = other DNA
tcaaagtgtgcatcaaatat

SEQ ID NO: 291524 - DNA, 20 bp, synthetic construct
  source 1..20: mol_type = other DNA
atcaaagtgtgcatcaaata

SEQ ID NO: 291525 - DNA, 20 bp, synthetic construct
  source 1..20: mol_type = other DNA
aatcaaagtgtgcatcaaat

SEQ ID NO: 291526 - DNA, 20 bp, synthetic construct
  source 1..20: mol_type = other DNA
taatcaaagtgtgcatcaaa

SEQ ID NO: 291527 - DNA, 20 bp, synthetic construct
  source 1..20: mol_type = other DNA
ataatcaaagtgtgcatcaa

SEQ ID NO: 291528 - DNA, 20 bp, synthetic construct
  source 1..20: mol_type = other DNA
tataatcaaagtgtgcatca

SEQ ID NO: 291529 - DNA, 20 bp, synthetic construct
  source 1..20: mol_type = other DNA
atataatcaaagtgtgcatc

SEQ ID NO: 291530 - DNA, 20 bp, synthetic construct
  source 1..20: mol_type = other DNA
tatataatcaaagtgtgcat

SEQ ID NO: 291531 - DNA, 20 bp, synthetic construct
  source 1..20: mol_type = other DNA
ctatataatcaaagtgtgca

SEQ ID NO: 291532 - DNA, 20 bp, synthetic construct
  source 1..20: mol_type = other DNA
tctatataatcaaagtgtgc

SEQ ID NO: 291533 - DNA, 20 bp, synthetic construct
  source 1..20: mol_type = other DNA
atctatataatcaaagtgtg

SEQ ID NO: 291534 - DNA, 20 bp, synthetic construct
  source 1..20: mol_type = other DNA
catctatataatcaaagtgt

SEQ ID NO: 291535 - DNA, 20 bp, synthetic construct
  source 1..20: mol_type = other DNA
tcatctatataatcaaagtg

SEQ ID NO: 291536 - DNA, 20 bp, synthetic construct
  source 1..20: mol_type = other DNA
ttcatctatataatcaaagt

SEQ ID NO: 291537 - DNA, 20 bp, synthetic construct
  source 1..20: mol_type = other DNA
cttcatctatataatcaaag

SEQ ID NO: 291538 - DNA, 20 bp, synthetic construct
  source 1..20: mol_type = other DNA
gcttcatctatataatcaaa

SEQ ID NO: 291539 - DNA, 20 bp, synthetic construct
  source 1..20: mol_type = other DNA
tgcttcatctatataatcaa

SEQ ID NO: 291540 - DNA, 20 bp, synthetic construct
  source 1..20: mol_type = other DNA
ttgcttcatctatataatca

SEQ ID NO: 291541 - DNA, 20 bp, synthetic construct
  source 1..20: mol_type = other DNA
tttgcttcatctatataatc

SEQ ID NO: 291542 - DNA, 20 bp, synthetic construct
  source 1..20: mol_type = other DNA
gtttgcttcatctatataat

SEQ ID NO: 291543 - DNA, 20 bp, synthetic construct
  source 1..20: mol_type = other DNA
agtttgcttcatctatataa

SEQ ID NO: 291544 - DNA, 20 bp, synthetic construct
  source 1..20: mol_type = other DNA
tagtttgcttcatctatata

SEQ ID NO: 291545 - DNA, 20 bp, synthetic construct
  source 1..20: mol_type = other DNA
atagtttgcttcatctatat

SEQ ID NO: 291546 - DNA, 20 bp, synthetic construct
  source 1..20: mol_type = other DNA
aatagtttgcttcatctata

SEQ ID NO: 291547 - DNA, 20 bp, synthetic construct
  source 1..20: mol_type = other DNA
aaatagtttgcttcatctat

SEQ ID NO: 291548 - DNA, 20 bp, synthetic construct
  source 1..20: mol_type = other DNA
aaaatagtttgcttcatcta

SEQ ID NO: 291549 - DNA, 20 bp, synthetic construct
  source 1..20: mol_type = other DNA
gaaaatagtttgcttcatct

SEQ ID NO: 291550 - DNA, 20 bp, synthetic construct
  source 1..20: mol_type = other DNA
tgaaaatagtttgcttcatc

SEQ ID NO: 291551 - DNA, 20 bp, synthetic construct
  source 1..20: mol_type = other DNA
ttgaaaatagtttgcttcat

SEQ ID NO: 291552 - DNA, 20 bp, synthetic construct
  source 1..20: mol_type = other DNA
cttgaaaatagtttgcttca

SEQ ID NO: 291553 - DNA, 20 bp, synthetic construct
  source 1..20: mol_type = other DNA
tcttgaaaatagtttgcttc

SEQ ID NO: 291554 - DNA, 20 bp, synthetic construct
  source 1..20: mol_type = other DNA
ctcttgaaaatagtttgctt

SEQ ID NO: 291555 - DNA, 20 bp, synthetic construct
  source 1..20: mol_type = other DNA
gctcttgaaaatagtttgct

SEQ ID NO: 291556 - DNA, 20 bp, synthetic construct
  source 1..20: mol_type = other DNA
agctcttgaaaatagtttgc

SEQ ID NO: 291557 - DNA, 20 bp, synthetic construct
  source 1..20: mol_type = other DNA
aagctcttgaaaatagtttg

SEQ ID NO: 291558 - DNA, 20 bp, synthetic construct
  source 1..20: mol_type = other DNA
aaagctcttgaaaatagttt

SEQ ID NO: 291559 - DNA, 20 bp, synthetic construct
  source 1..20: mol_type = other DNA
caaagctcttgaaaatagtt

SEQ ID NO: 291560 - DNA, 20 bp, synthetic construct
  source 1..20: mol_type = other DNA
gcaaagctcttgaaaatagt

SEQ ID NO: 291561 - DNA, 20 bp, synthetic construct
  source 1..20: mol_type = other DNA
tgcaaagctcttgaaaatag

SEQ ID NO: 291562 - DNA, 20 bp, synthetic construct
  source 1..20: mol_type = other DNA
ttgcaaagctcttgaaaata

SEQ ID NO: 291563 - DNA, 20 bp, synthetic construct
  source 1..20: mol_type = other DNA
cttgcaaagctcttgaaaat

SEQ ID NO: 291564 - DNA, 20 bp, synthetic construct
  source 1..20: mol_type = other DNA
ccttgcaaagctcttgaaaa

SEQ ID NO: 291565 - DNA, 20 bp, synthetic construct
  source 1..20: mol_type = other DNA
tccttgcaaagctcttgaaa

SEQ ID NO: 291566 - DNA, 20 bp, synthetic construct
  source 1..20: mol_type = other DNA
gtccttgcaaagctcttgaa

SEQ ID NO: 291567 - DNA, 20 bp, synthetic construct
  source 1..20: mol_type = other DNA
agtccttgcaaagctcttga

SEQ ID NO: 291568 - DNA, 20 bp, synthetic construct
  source 1..20: mol_type = other DNA
aagtccttgcaaagctcttg

SEQ ID NO: 291569 - DNA, 20 bp, synthetic construct
  source 1..20: mol_type = other DNA
taagtccttgcaaagctctt

SEQ ID NO: 291570 - DNA, 20 bp, synthetic construct
  source 1..20: mol_type = other DNA
gtaagtccttgcaaagctct

SEQ ID NO: 291571 - DNA, 20 bp, synthetic construct
  source 1..20: mol_type = other DNA
agtaagtccttgcaaagctc

SEQ ID NO: 291572 - DNA, 20 bp, synthetic construct
  source 1..20: mol_type = other DNA
aagtaagtccttgcaaagct

SEQ ID NO: 291573 - DNA, 20 bp, synthetic construct
  source 1..20: mol_type = other DNA
caagtaagtccttgcaaagc

SEQ ID NO: 291574 - DNA, 20 bp, synthetic construct
  source 1..20: mol_type = other DNA
acaagtaagtccttgcaaag

SEQ ID NO: 291575 - DNA, 20 bp, synthetic construct
  source 1..20: mol_type = other DNA
tacaagtaagtccttgcaaa

SEQ ID NO: 291576 - DNA, 20 bp, synthetic construct
  source 1..20: mol_type = other DNA
atacaagtaagtccttgcaa

SEQ ID NO: 291577 - DNA, 20 bp, synthetic construct
  source 1..20: mol_type = other DNA
gatacaagtaagtccttgca

SEQ ID NO: 291578 - DNA, 20 bp, synthetic construct
  source 1..20: mol_type = other DNA
ggatacaagtaagtccttgc

SEQ ID NO: 291579 - DNA, 20 bp, synthetic construct
  source 1..20: mol_type = other DNA
tggatacaagtaagtccttg

SEQ ID NO: 291580 - DNA, 20 bp, synthetic construct
  source 1..20: mol_type = other DNA
ttggatacaagtaagtcctt

SEQ ID NO: 291581 - DNA, 20 bp, synthetic construct
  source 1..20: mol_type = other DNA
tttggatacaagtaagtcct

SEQ ID NO: 291582 - DNA, 20 bp, synthetic construct
  source 1..20: mol_type = other DNA
gtttggatacaagtaagtcc

SEQ ID NO: 291583 - DNA, 20 bp, synthetic construct
  source 1..20: mol_type = other DNA
tgtttggatacaagtaagtc

SEQ ID NO: 291584 - DNA, 20 bp, synthetic construct
  source 1..20: mol_type = other DNA
gtgtttggatacaagtaagt

SEQ ID NO: 291585 - DNA, 20 bp, synthetic construct
  source 1..20: mol_type = other DNA
ggtgtttggatacaagtaag

SEQ ID NO: 291586 - DNA, 20 bp, synthetic construct
  source 1..20: mol_type = other DNA
tggtgtttggatacaagtaa

SEQ ID NO: 291587 - DNA, 20 bp, synthetic construct
  source 1..20: mol_type = other DNA
atggtgtttggatacaagta

SEQ ID NO: 291588 - DNA, 20 bp, synthetic construct
  source 1..20: mol_type = other DNA
aatggtgtttggatacaagt

SEQ ID NO: 291589 - DNA, 20 bp, synthetic construct
  source 1..20: mol_type = other DNA
gaatggtgtttggatacaag

SEQ ID NO: 291590 - DNA, 20 bp, synthetic construct
  source 1..20: mol_type = other DNA
agaatggtgtttggatacaa

SEQ ID NO: 291591 - DNA, 20 bp, synthetic construct
  source 1..20: mol_type = other DNA
tagaatggtgtttggataca

SEQ ID NO: 291592 - DNA, 20 bp, synthetic construct
  source 1..20: mol_type = other DNA
ttagaatggtgtttggatac

SEQ ID NO: 291593 - DNA, 20 bp, synthetic construct
  source 1..20: mol_type = other DNA
tttagaatggtgtttggata

SEQ ID NO: 291594 - DNA, 20 bp, synthetic construct
  source 1..20: mol_type = other DNA
ctttagaatggtgtttggat

SEQ ID NO: 291595 - DNA, 20 bp, synthetic construct
  source 1..20: mol_type = other DNA
cctttagaatggtgtttgga

SEQ ID NO: 291596 - DNA, 20 bp, synthetic construct
  source 1..20: mol_type = other DNA
tcctttagaatggtgtttgg

SEQ ID NO: 291597 - DNA, 20 bp, synthetic construct
  source 1..20: mol_type = other DNA
ctcctttagaatggtgtttg

SEQ ID NO: 291598 - DNA, 20 bp, synthetic construct
  source 1..20: mol_type = other DNA
actcctttagaatggtgttt

SEQ ID NO: 291599 - DNA, 20 bp, synthetic construct
  source 1..20: mol_type = other DNA
gactcctttagaatggtgtt

SEQ ID NO: 291600 - DNA, 20 bp, synthetic construct
  source 1..20: mol_type = other DNA
agactcctttagaatggtgt

SEQ ID NO: 291601 - DNA, 20 bp, synthetic construct
  source 1..20: mol_type = other DNA
aagactcctttagaatggtg

SEQ ID NO: 291602 - DNA, 20 bp, synthetic construct
  source 1..20: mol_type = other DNA
taagactcctttagaatggt

SEQ ID NO: 291603 - DNA, 20 bp, synthetic construct
  source 1..20: mol_type = other DNA
gtaagactcctttagaatgg

SEQ ID NO: 291604 - DNA, 20 bp, synthetic construct
  source 1..20: mol_type = other DNA
ggtaagactcctttagaatg

SEQ ID NO: 291605 - DNA, 20 bp, synthetic construct
  source 1..20: mol_type = other DNA
aggtaagactcctttagaat

SEQ ID NO: 291606 - DNA, 20 bp, synthetic construct
  source 1..20: mol_type = other DNA
taggtaagactcctttagaa

SEQ ID NO: 291607 - DNA, 20 bp, synthetic construct
  source 1..20: mol_type = other DNA
gtaggtaagactcctttaga

SEQ ID NO: 291608 - DNA, 20 bp, synthetic construct
  source 1..20: mol_type = other DNA
agtaggtaagactcctttag

SEQ ID NO: 291609 - DNA, 20 bp, synthetic construct
  source 1..20: mol_type = other DNA
aagtaggtaagactccttta

SEQ ID NO: 291610 - DNA, 20 bp, synthetic construct
  source 1..20: mol_type = other DNA
gaagtaggtaagactccttt

SEQ ID NO: 291611 - DNA, 20 bp, synthetic construct
  source 1..20: mol_type = other DNA
agaagtaggtaagactcctt

SEQ ID NO: 291612 - DNA, 20 bp, synthetic construct
  source 1..20: mol_type = other DNA
tagaagtaggtaagactcct

SEQ ID NO: 291613 - DNA, 20 bp, synthetic construct
  source 1..20: mol_type = other DNA
ttagaagtaggtaagactcc

SEQ ID NO: 291614 - DNA, 20 bp, synthetic construct
  source 1..20: mol_type = other DNA
tttagaagtaggtaagactc

SEQ ID NO: 291615 - DNA, 20 bp, synthetic construct
  source 1..20: mol_type = other DNA
ctttagaagtaggtaagact

SEQ ID NO: 291616 - DNA, 20 bp, synthetic construct
  source 1..20: mol_type = other DNA
cctttagaagtaggtaagac

SEQ ID NO: 291617 - DNA, 20 bp, synthetic construct
  source 1..20: mol_type = other DNA
gcctttagaagtaggtaaga

SEQ ID NO: 291618 - DNA, 20 bp, synthetic construct
  source 1..20: mol_type = other DNA
agcctttagaagtaggtaag

SEQ ID NO: 291619 - DNA, 20 bp, synthetic construct
  source 1..20: mol_type = other DNA
cagcctttagaagtaggtaa

SEQ ID NO: 291620 - DNA, 20 bp, synthetic construct
  source 1..20: mol_type = other DNA
ccagcctttagaagtaggta

SEQ ID NO: 291621 - DNA, 20 bp, synthetic construct
  source 1..20: mol_type = other DNA
accagcctttagaagtaggt

SEQ ID NO: 291622 - DNA, 20 bp, synthetic construct
  source 1..20: mol_type = other DNA
gaccagcctttagaagtagg

SEQ ID NO: 291623 - DNA, 20 bp, synthetic construct
  source 1..20: mol_type = other DNA
agaccagcctttagaagtag

SEQ ID NO: 291624 - DNA, 20 bp, synthetic construct
  source 1..20: mol_type = other DNA
gagaccagcctttagaagta

SEQ ID NO: 291625 - DNA, 20 bp, synthetic construct
  source 1..20: mol_type = other DNA
agagaccagcctttagaagt

SEQ ID NO: 291626 - DNA, 20 bp, synthetic construct
  source 1..20: mol_type = other DNA
tagagaccagcctttagaag

SEQ ID NO: 291627 - DNA, 20 bp, synthetic construct
  source 1..20: mol_type = other DNA
gtagagaccagcctttagaa

SEQ ID NO: 291628 - DNA, 20 bp, synthetic construct
  source 1..20: mol_type = other DNA
agtagagaccagcctttaga

SEQ ID NO: 291629 - DNA, 20 bp, synthetic construct
  source 1..20: mol_type = other DNA
aagtagagaccagcctttag

SEQ ID NO: 291630 - DNA, 20 bp, synthetic construct
  source 1..20: mol_type = other DNA
caagtagagaccagccttta

SEQ ID NO: 291631 - DNA, 20 bp, synthetic construct
  source 1..20: mol_type = other DNA
ccaagtagagaccagccttt

SEQ ID NO: 291632 - DNA, 20 bp, synthetic construct
  source 1..20: mol_type = other DNA
tccaagtagagaccagcctt

SEQ ID NO: 291633 - DNA, 20 bp, synthetic construct
  source 1..20: mol_type = other DNA
ttccaagtagagaccagcct

SEQ ID NO: 291634 - DNA, 20 bp, synthetic construct
  source 1..20: mol_type = other DNA
gttccaagtagagaccagcc

SEQ ID NO: 291635 - DNA, 20 bp, synthetic construct
  source 1..20: mol_type = other DNA
ggttccaagtagagaccagc

SEQ ID NO: 291636 - DNA, 20 bp, synthetic construct
  source 1..20: mol_type = other DNA
tggttccaagtagagaccag

SEQ ID NO: 291637 - DNA, 20 bp, synthetic construct
  source 1..20: mol_type = other DNA
gtggttccaagtagagacca

SEQ ID NO: 291638 - DNA, 20 bp, synthetic construct
  source 1..20: mol_type = other DNA
agtggttccaagtagagacc

SEQ ID NO: 291639 - DNA, 20 bp, synthetic construct
  source 1..20: mol_type = other DNA
aagtggttccaagtagagac

SEQ ID NO: 291640 - DNA, 20 bp, synthetic construct
  source 1..20: mol_type = other DNA
caagtggttccaagtagaga

SEQ ID NO: 291641 - DNA, 20 bp, synthetic construct
  source 1..20: mol_type = other DNA
gcaagtggttccaagtagag

SEQ ID NO: 291642 - DNA, 20 bp, synthetic construct
  source 1..20: mol_type = other DNA
agcaagtggttccaagtaga

SEQ ID NO: 291643 - DNA, 20 bp, synthetic construct
  source 1..20: mol_type = other DNA
aagcaagtggttccaagtag

SEQ ID NO: 291644 - DNA, 20 bp, synthetic construct
  source 1..20: mol_type = other DNA
caagcaagtggttccaagta

SEQ ID NO: 291645 - DNA, 20 bp, synthetic construct
  source 1..20: mol_type = other DNA
ccaagcaagtggttccaagt

SEQ ID NO: 291646 - DNA, 20 bp, synthetic construct
  source 1..20: mol_type = other DNA
gccaagcaagtggttccaag

SEQ ID NO: 291647 - DNA, 20 bp, synthetic construct
  source 1..20: mol_type = other DNA
ggccaagcaagtggttccaa

SEQ ID NO: 291648 - DNA, 20 bp, synthetic construct
  source 1..20: mol_type = other DNA
gggccaagcaagtggttcca

SEQ ID NO: 291649 - DNA, 20 bp, synthetic construct
  source 1..20: mol_type = other DNA
agggccaagcaagtggttcc

SEQ ID NO: 291650 - DNA, 20 bp, synthetic construct
  source 1..20: mol_type = other DNA
cagggccaagcaagtggttc

SEQ ID NO: 291651 - DNA, 20 bp, synthetic construct
  source 1..20: mol_type = other DNA
ccagggccaagcaagtggtt

SEQ ID NO: 291652 - DNA, 20 bp, synthetic construct
  source 1..20: mol_type = other DNA
accagggccaagcaagtggt

SEQ ID NO: 291653 - DNA, 20 bp, synthetic construct
  source 1..20: mol_type = other DNA
aaccagggccaagcaagtgg

SEQ ID NO: 291654 - DNA, 20 bp, synthetic construct
  source 1..20: mol_type = other DNA
gaaccagggccaagcaagtg

SEQ ID NO: 291655 - DNA, 20 bp, synthetic construct
  source 1..20: mol_type = other DNA
tgaaccagggccaagcaagt

SEQ ID NO: 291656 - DNA, 20 bp, synthetic construct
  source 1..20: mol_type = other DNA
ttgaaccagggccaagcaag

SEQ ID NO: 291657 - DNA, 20 bp, synthetic construct
  source 1..20: mol_type = other DNA
cttgaaccagggccaagcaa

SEQ ID NO: 291658 - DNA, 20 bp, synthetic construct
  source 1..20: mol_type = other DNA
acttgaaccagggccaagca

SEQ ID NO: 291659 - DNA, 20 bp, synthetic construct
  source 1..20: mol_type = other DNA
gacttgaaccagggccaagc

SEQ ID NO: 291660 - DNA, 20 bp, synthetic construct
  source 1..20: mol_type = other DNA
ggacttgaaccagggccaag

SEQ ID NO: 291661 - DNA, 20 bp, synthetic construct
  source 1..20: mol_type = other DNA
aggacttgaaccagggccaa

SEQ ID NO: 291662 - DNA, 20 bp, synthetic construct
  source 1..20: mol_type = other DNA
caggacttgaaccagggcca

SEQ ID NO: 291663 - DNA, 20 bp, synthetic construct
  source 1..20: mol_type = other DNA
gcaggacttgaaccagggcc

SEQ ID NO: 291664 - DNA, 20 bp, synthetic construct
  source 1..20: mol_type = other DNA
agcaggacttgaaccagggc

SEQ ID NO: 291665 - DNA, 20 bp, synthetic construct
  source 1..20: mol_type = other DNA
cagcaggacttgaaccaggg

SEQ ID NO: 291666 - DNA, 20 bp, synthetic construct
  source 1..20: mol_type = other DNA
gcagcaggacttgaaccagg

SEQ ID NO: 291667 - DNA, 20 bp, synthetic construct
  source 1..20: mol_type = other DNA
tgcagcaggacttgaaccag

SEQ ID NO: 291668 - DNA, 20 bp, synthetic construct
  source 1..20: mol_type = other DNA
ttgcagcaggacttgaacca

SEQ ID NO: 291669 - DNA, 20 bp, synthetic construct
  source 1..20: mol_type = other DNA
tttgcagcaggacttgaacc

SEQ ID NO: 291670 - DNA, 20 bp, synthetic construct
  source 1..20: mol_type = other DNA
gtttgcagcaggacttgaac

SEQ ID NO: 291671 - DNA, 20 bp, synthetic construct
  source 1..20: mol_type = other DNA
ggtttgcagcaggacttgaa

SEQ ID NO: 291672 - DNA, 20 bp, synthetic construct
  source 1..20: mol_type = other DNA
aggtttgcagcaggacttga

SEQ ID NO: 291673 - DNA, 20 bp, synthetic construct
  source 1..20: mol_type = other DNA
caggtttgcagcaggacttg

SEQ ID NO: 291674 - DNA, 20 bp, synthetic construct
  source 1..20: mol_type = other DNA
ccaggtttgcagcaggactt

SEQ ID NO: 291675 - DNA, 20 bp, synthetic construct
  source 1..20: mol_type = other DNA
tccaggtttgcagcaggact

SEQ ID NO: 291676 - DNA, 20 bp, synthetic construct
  source 1..20: mol_type = other DNA
ttccaggtttgcagcaggac

SEQ ID NO: 291677 - DNA, 20 bp, synthetic construct
  source 1..20: mol_type = other DNA
cttccaggtttgcagcagga

SEQ ID NO: 291678 - DNA, 20 bp, synthetic construct
  source 1..20: mol_type = other DNA
acttccaggtttgcagcagg

SEQ ID NO: 291679 - DNA, 20 bp, synthetic construct
  source 1..20: mol_type = other DNA
gacttccaggtttgcagcag

SEQ ID NO: 291680 - DNA, 20 bp, synthetic construct
  source 1..20: mol_type = other DNA
ggacttccaggtttgcagca

SEQ ID NO: 291681 - DNA, 20 bp, synthetic construct
  source 1..20: mol_type = other DNA
aggacttccaggtttgcagc

SEQ ID NO: 291682 - DNA, 20 bp, synthetic construct
  source 1..20: mol_type = other DNA
caggacttccaggtttgcag

SEQ ID NO: 291683 - DNA, 20 bp, synthetic construct
  source 1..20: mol_type = other DNA
acaggacttccaggtttgca

SEQ ID NO: 291684 - DNA, 20 bp, synthetic construct
  source 1..20: mol_type = other DNA
gacaggacttccaggtttgc

SEQ ID NO: 291685 - DNA, 20 bp, synthetic construct
  source 1..20: mol_type = other DNA
tgacaggacttccaggtttg

SEQ ID NO: 291686 - DNA, 20 bp, synthetic construct
  source 1..20: mol_type = other DNA
atgacaggacttccaggttt

SEQ ID NO: 291687 - DNA, 20 bp, synthetic construct
  source 1..20: mol_type = other DNA
aatgacaggacttccaggtt

SEQ ID NO: 291688 - DNA, 20 bp, synthetic construct
  source 1..20: mol_type = other DNA
caatgacaggacttccaggt

SEQ ID NO: 291689 - DNA, 20 bp, synthetic construct
  source 1..20: mol_type = other DNA
acaatgacaggacttccagg

SEQ ID NO: 291690 - DNA, 20 bp, synthetic construct
  source 1..20: mol_type = other DNA
gacaatgacaggacttccag

SEQ ID NO: 291691 - DNA, 20 bp, synthetic construct
  source 1..20: mol_type = other DNA
agacaatgacaggacttcca

SEQ ID NO: 291692 - DNA, 20 bp, synthetic construct
  source 1..20: mol_type = other DNA
aagacaatgacaggacttcc

SEQ ID NO: 291693 - DNA, 20 bp, synthetic construct
  source 1..20: mol_type = other DNA
gaagacaatgacaggacttc

SEQ ID NO: 291694 - DNA, 20 bp, synthetic construct
  source 1..20: mol_type = other DNA
agaagacaatgacaggactt

SEQ ID NO: 291695 - DNA, 20 bp, synthetic construct
  source 1..20: mol_type = other DNA
aagaagacaatgacaggact

SEQ ID NO: 291696 - DNA, 20 bp, synthetic construct
  source 1..20: mol_type = other DNA
gaagaagacaatgacaggac

SEQ ID NO: 291697 - DNA, 20 bp, synthetic construct
  source 1..20: mol_type = other DNA
ggaagaagacaatgacagga

SEQ ID NO: 291698 - DNA, 20 bp, synthetic construct
  source 1..20: mol_type = other DNA
gggaagaagacaatgacagg

SEQ ID NO: 291699 - DNA, 20 bp, synthetic construct
  source 1..20: mol_type = other DNA
agggaagaagacaatgacag

SEQ ID NO: 291700 - DNA, 20 bp, synthetic construct
  source 1..20: mol_type = other DNA
gagggaagaagacaatgaca

SEQ ID NO: 291701 - DNA, 20 bp, synthetic construct
  source 1..20: mol_type = other DNA
ggagggaagaagacaatgac

SEQ ID NO: 291702 - DNA, 20 bp, synthetic construct
  source 1..20: mol_type = other DNA
tggagggaagaagacaatga

SEQ ID NO: 291703 - DNA, 20 bp, synthetic construct
  source 1..20: mol_type = other DNA
ctggagggaagaagacaatg

SEQ ID NO: 291704 - DNA, 20 bp, synthetic construct
  source 1..20: mol_type = other DNA
tctggagggaagaagacaat

SEQ ID NO: 291705 - DNA, 20 bp, synthetic construct
  source 1..20: mol_type = other DNA
ctctggagggaagaagacaa

SEQ ID NO: 291706 - DNA, 20 bp, synthetic construct
  source 1..20: mol_type = other DNA
gctctggagggaagaagaca

SEQ ID NO: 291707 - DNA, 20 bp, synthetic construct
  source 1..20: mol_type = other DNA
tgctctggagggaagaagac

SEQ ID NO: 291708 - DNA, 20 bp, synthetic construct
  source 1..20: mol_type = other DNA
ctgctctggagggaagaaga

SEQ ID NO: 291709 - DNA, 20 bp, synthetic construct
  source 1..20: mol_type = other DNA
actgctctggagggaagaag

SEQ ID NO: 291710 - DNA, 20 bp, synthetic construct
  source 1..20: mol_type = other DNA
cactgctctggagggaagaa

SEQ ID NO: 291711 - DNA, 20 bp, synthetic construct
  source 1..20: mol_type = other DNA
ccactgctctggagggaaga

SEQ ID NO: 291712 - DNA, 20 bp, synthetic construct
  source 1..20: mol_type = other DNA
gccactgctctggagggaag

SEQ ID NO: 291713 - DNA, 20 bp, synthetic construct
  source 1..20: mol_type = other DNA
tgccactgctctggagggaa

SEQ ID NO: 291714 - DNA, 20 bp, synthetic construct
  source 1..20: mol_type = other DNA
gtgccactgctctggaggga

SEQ ID NO: 291715 - DNA, 20 bp, synthetic construct
  source 1..20: mol_type = other DNA
ggtgccactgctctggaggg

SEQ ID NO: 291716 - DNA, 20 bp, synthetic construct
  source 1..20: mol_type = other DNA
gggtgccactgctctggagg

SEQ ID NO: 291717 - DNA, 20 bp, synthetic construct
  source 1..20: mol_type = other DNA
tgggtgccactgctctggag

SEQ ID NO: 291718 - DNA, 20 bp, synthetic construct
  source 1..20: mol_type = other DNA
ttgggtgccactgctctgga

SEQ ID NO: 291719 - DNA, 20 bp, synthetic construct
  source 1..20: mol_type = other DNA
attgggtgccactgctctgg

SEQ ID NO: 291720 - DNA, 20 bp, synthetic construct
  source 1..20: mol_type = other DNA
gattgggtgccactgctctg

SEQ ID NO: 291721 - DNA, 20 bp, synthetic construct
  source 1..20: mol_type = other DNA
agattgggtgccactgctct

SEQ ID NO: 291722 - DNA, 20 bp, synthetic construct
  source 1..20: mol_type = other DNA
tagattgggtgccactgctc

SEQ ID NO: 291723 - DNA, 20 bp, synthetic construct
  source 1..20: mol_type = other DNA
ttagattgggtgccactgct

SEQ ID NO: 291724 - DNA, 20 bp, synthetic construct
  source 1..20: mol_type = other DNA
attagattgggtgccactgc

SEQ ID NO: 291725 - DNA, 20 bp, synthetic construct
  source 1..20: mol_type = other DNA
aattagattgggtgccactg

SEQ ID NO: 291726 - DNA, 20 bp, synthetic construct
  source 1..20: mol_type = other DNA
aaattagattgggtgccact

SEQ ID NO: 291727 - DNA, 20 bp, synthetic construct
  source 1..20: mol_type = other DNA
aaaattagattgggtgccac

SEQ ID NO: 291728 - DNA, 20 bp, synthetic construct
  source 1..20: mol_type = other DNA
aaaaattagattgggtgcca

SEQ ID NO: 291729 - DNA, 20 bp, synthetic construct
  source 1..20: mol_type = other DNA
caaaaattagattgggtgcc

SEQ ID NO: 291730 - DNA, 20 bp, synthetic construct
  source 1..20: mol_type = other DNA
gcaaaaattagattgggtgc

SEQ ID NO: 291731 - DNA, 20 bp, synthetic construct
  source 1..20: mol_type = other DNA
agcaaaaattagattgggtg

SEQ ID NO: 291732 - DNA, 20 bp, synthetic construct
  source 1..20: mol_type = other DNA
cagcaaaaattagattgggt

SEQ ID NO: 291733 - DNA, 20 bp, synthetic construct
  source 1..20: mol_type = other DNA
acagcaaaaattagattggg

SEQ ID NO: 291734 - DNA, 20 bp, synthetic construct
  source 1..20: mol_type = other DNA
cacagcaaaaattagattgg

SEQ ID NO: 291735 - DNA, 20 bp, synthetic construct
  source 1..20: mol_type = other DNA
gcacagcaaaaattagattg

SEQ ID NO: 291736 - DNA, 20 bp, synthetic construct
  source 1..20: mol_type = other DNA
ggcacagcaaaaattagatt

SEQ ID NO: 291737 - DNA, 20 bp, synthetic construct
  source 1..20: mol_type = other DNA
gggcacagcaaaaattagat

SEQ ID NO: 291738 - DNA, 20 bp, synthetic construct
  source 1..20: mol_type = other DNA
ggggcacagcaaaaattaga

SEQ ID NO: 291739 - DNA, 20 bp, synthetic construct
  source 1..20: mol_type = other DNA
tggggcacagcaaaaattag

SEQ ID NO: 291740 - DNA, 20 bp, synthetic construct
  source 1..20: mol_type = other DNA
ctggggcacagcaaaaatta

SEQ ID NO: 291741 - DNA, 20 bp, synthetic construct
  source 1..20: mol_type = other DNA
gctggggcacagcaaaaatt

SEQ ID NO: 291742 - DNA, 20 bp, synthetic construct
  source 1..20: mol_type = other DNA
tgctggggcacagcaaaaat

SEQ ID NO: 291743 - DNA, 20 bp, synthetic construct
  source 1..20: mol_type = other DNA
ctgctggggcacagcaaaaa

SEQ ID NO: 291744 - DNA, 20 bp, synthetic construct
  source 1..20: mol_type = other DNA
gctgctggggcacagcaaaa

SEQ ID NO: 291745 - DNA, 20 bp, synthetic construct
  source 1..20: mol_type = other DNA
ggctgctggggcacagcaaa

SEQ ID NO: 291746 - DNA, 20 bp, synthetic construct
  source 1..20: mol_type = other DNA
gggctgctggggcacagcaa

SEQ ID NO: 291747 - DNA, 20 bp, synthetic construct
  source 1..20: mol_type = other DNA
ggggctgctggggcacagca

SEQ ID NO: 291748 - DNA, 20 bp, synthetic construct
  source 1..20: mol_type = other DNA
aggggctgctggggcacagc

SEQ ID NO: 291749 - DNA, 20 bp, synthetic construct
  source 1..20: mol_type = other DNA
caggggctgctggggcacag

SEQ ID NO: 291750 - DNA, 20 bp, synthetic construct
  source 1..20: mol_type = other DNA
ccaggggctgctggggcaca

SEQ ID NO: 291751 - DNA, 20 bp, synthetic construct
  source 1..20: mol_type = other DNA
gccaggggctgctggggcac

SEQ ID NO: 291752 - DNA, 20 bp, synthetic construct
  source 1..20: mol_type = other DNA
tgccaggggctgctggggca

SEQ ID NO: 291753 - DNA, 20 bp, synthetic construct
  source 1..20: mol_type = other DNA
gtgccaggggctgctggggc

SEQ ID NO: 291754 - DNA, 20 bp, synthetic construct
  source 1..20: mol_type = other DNA
agtgccaggggctgctgggg

SEQ ID NO: 291755 - DNA, 20 bp, synthetic construct
  source 1..20: mol_type = other DNA
aagtgccaggggctgctggg

SEQ ID NO: 291756 - DNA, 20 bp, synthetic construct
  source 1..20: mol_type = other DNA
aaagtgccaggggctgctgg

SEQ ID NO: 291757 - DNA, 20 bp, synthetic construct
  source 1..20: mol_type = other DNA
caaagtgccaggggctgctg

SEQ ID NO: 291758 - DNA, 20 bp, synthetic construct
  source 1..20: mol_type = other DNA
gcaaagtgccaggggctgct

SEQ ID NO: 291759 - DNA, 20 bp, synthetic construct
  source 1..20: mol_type = other DNA
ggcaaagtgccaggggctgc

SEQ ID NO: 291760 - DNA, 20 bp, synthetic construct
  source 1..20: mol_type = other DNA
gggcaaagtgccaggggctg

SEQ ID NO: 291761 - DNA, 20 bp, synthetic construct
  source 1..20: mol_type = other DNA
agggcaaagtgccaggggct

SEQ ID NO: 291762 - DNA, 20 bp, synthetic construct
  source 1..20: mol_type = other DNA
cagggcaaagtgccaggggc

SEQ ID NO: 291763 - DNA, 20 bp, synthetic construct
  source 1..20: mol_type = other DNA
acagggcaaagtgccagggg

SEQ ID NO: 291764 - DNA, 20 bp, synthetic construct
  source 1..20: mol_type = other DNA
tacagggcaaagtgccaggg

SEQ ID NO: 291765 - DNA, 20 bp, synthetic construct
  source 1..20: mol_type = other DNA
ctacagggcaaagtgccagg

SEQ ID NO: 291766 - DNA, 20 bp, synthetic construct
  source 1..20: mol_type = other DNA
tctacagggcaaagtgccag

SEQ ID NO: 291767 - DNA, 20 bp, synthetic construct
  source 1..20: mol_type = other DNA
gtctacagggcaaagtgcca

SEQ ID NO: 291768 - DNA, 20 bp, synthetic construct
  source 1..20: mol_type = other DNA
agtctacagggcaaagtgcc

SEQ ID NO: 291769 - DNA, 20 bp, synthetic construct
  source 1..20: mol_type = other DNA
cagtctacagggcaaagtgc

SEQ ID NO: 291770 - DNA, 20 bp, synthetic construct
  source 1..20: mol_type = other DNA
gcagtctacagggcaaagtg

SEQ ID NO: 291771 - DNA, 20 bp, synthetic construct
  source 1..20: mol_type = other DNA
tgcagtctacagggcaaagt

SEQ ID NO: 291772 - DNA, 20 bp, synthetic construct
  source 1..20: mol_type = other DNA
ctgcagtctacagggcaaag

SEQ ID NO: 291773 - DNA, 20 bp, synthetic construct
  source 1..20: mol_type = other DNA
tctgcagtctacagggcaaa

SEQ ID NO: 291774 - DNA, 20 bp, synthetic construct
  source 1..20: mol_type = other DNA
gtctgcagtctacagggcaa

SEQ ID NO: 291775 - DNA, 20 bp, synthetic construct
  source 1..20: mol_type = other DNA
ggtctgcagtctacagggca

SEQ ID NO: 291776 - DNA, 20 bp, synthetic construct
  source 1..20: mol_type = other DNA
aggtctgcagtctacagggc

SEQ ID NO: 291777 - DNA, 20 bp, synthetic construct
  source 1..20: mol_type = other DNA
gaggtctgcagtctacaggg

SEQ ID NO: 291778 - DNA, 20 bp, synthetic construct
  source 1..20: mol_type = other DNA
tgaggtctgcagtctacagg

SEQ ID NO: 291779 - DNA, 20 bp, synthetic construct
  source 1..20: mol_type = other DNA
atgaggtctgcagtctacag

SEQ ID NO: 291780 - DNA, 20 bp, synthetic construct
  source 1..20: mol_type = other DNA
catgaggtctgcagtctaca

SEQ ID NO: 291781 - DNA, 20 bp, synthetic construct
  source 1..20: mol_type = other DNA
acatgaggtctgcagtctac

SEQ ID NO: 291782 - DNA, 20 bp, synthetic construct
  source 1..20: mol_type = other DNA
tacatgaggtctgcagtcta

SEQ ID NO: 291783 - DNA, 20 bp, synthetic construct
  source 1..20: mol_type = other DNA
ttacatgaggtctgcagtct

SEQ ID NO: 291784 - DNA, 20 bp, synthetic construct
  source 1..20: mol_type = other DNA
attacatgaggtctgcagtc

SEQ ID NO: 291785 - DNA, 20 bp, synthetic construct
  source 1..20: mol_type = other DNA
cattacatgaggtctgcagt

SEQ ID NO: 291786 - DNA, 20 bp, synthetic construct
  source 1..20: mol_type = other DNA
acattacatgaggtctgcag

SEQ ID NO: 291787 - DNA, 20 bp, synthetic construct
  source 1..20: mol_type = other DNA
tacattacatgaggtctgca

SEQ ID NO: 291788 - DNA, 20 bp, synthetic construct
  source 1..20: mol_type = other DNA
atacattacatgaggtctgc

SEQ ID NO: 291789 - DNA, 20 bp, synthetic construct
  source 1..20: mol_type = other DNA
catacattacatgaggtctg

SEQ ID NO: 291790 - DNA, 20 bp, synthetic construct
  source 1..20: mol_type = other DNA
acatacattacatgaggtct

SEQ ID NO: 291791 - DNA, 20 bp, synthetic construct
  source 1..20: mol_type = other DNA
aacatacattacatgaggtc

SEQ ID NO: 291792 - DNA, 20 bp, synthetic construct
  source 1..20: mol_type = other DNA
taacatacattacatgaggt

SEQ ID NO: 291793 - DNA, 20 bp, synthetic construct
  source 1..20: mol_type = other DNA
ttaacatacattacatgagg

SEQ ID NO: 291794 - DNA, 20 bp, synthetic construct
  source 1..20: mol_type = other DNA
cttaacatacattacatgag

SEQ ID NO: 291795 - DNA, 20 bp, synthetic construct
  source 1..20: mol_type = other DNA
acttaacatacattacatga

SEQ ID NO: 291796 - DNA, 20 bp, synthetic construct
  source 1..20: mol_type = other DNA
gacttaacatacattacatg

SEQ ID NO: 291797 - DNA, 20 bp, synthetic construct
  source 1..20: mol_type = other DNA
ggacttaacatacattacat

SEQ ID NO: 291798 - DNA, 20 bp, synthetic construct
  source 1..20: mol_type = other DNA
tggacttaacatacattaca

SEQ ID NO: 291799 - DNA, 20 bp, synthetic construct
  source 1..20: mol_type = other DNA
gtggacttaacatacattac

SEQ ID NO: 291800 - DNA, 20 bp, synthetic construct
  source 1..20: mol_type = other DNA
tgtggacttaacatacatta

SEQ ID NO: 291801 - DNA, 20 bp, synthetic construct
  source 1..20: mol_type = other DNA
ctgtggacttaacatacatt

SEQ ID NO: 291802 - DNA, 20 bp, synthetic construct
  source 1..20: mol_type = other DNA
tctgtggacttaacatacat

SEQ ID NO: 291803 - DNA, 20 bp, synthetic construct
  source 1..20: mol_type = other DNA
ttctgtggacttaacataca

SEQ ID NO: 291804 - DNA, 20 bp, synthetic construct
  source 1..20: mol_type = other DNA
gttctgtggacttaacatac

SEQ ID NO: 291805 - DNA, 20 bp, synthetic construct
  source 1..20: mol_type = other DNA
ggttctgtggacttaacata

SEQ ID NO: 291806 - DNA, 20 bp, synthetic construct
  source 1..20: mol_type = other DNA
tggttctgtggacttaacat

SEQ ID NO: 291807 - DNA, 20 bp, synthetic construct
  source 1..20: mol_type = other DNA
gtggttctgtggacttaaca

SEQ ID NO: 291808 - DNA, 20 bp, synthetic construct
  source 1..20: mol_type = other DNA
tgtggttctgtggacttaac

SEQ ID NO: 291809 - DNA, 20 bp, synthetic construct
  source 1..20: mol_type = other DNA
ctgtggttctgtggacttaa

SEQ ID NO: 291810 - DNA, 20 bp, synthetic construct
  source 1..20: mol_type = other DNA
tctgtggttctgtggactta

SEQ ID NO: 291811 - DNA, 20 bp, synthetic construct
  source 1..20: mol_type = other DNA
ttctgtggttctgtggactt

SEQ ID NO: 291812 - DNA, 20 bp, synthetic construct
  source 1..20: mol_type = other DNA
cttctgtggttctgtggact

SEQ ID NO: 291813 - DNA, 20 bp, synthetic construct
  source 1..20: mol_type = other DNA
tcttctgtggttctgtggac

SEQ ID NO: 291814 - DNA, 20 bp, synthetic construct
  source 1..20: mol_type = other DNA
atcttctgtggttctgtgga

SEQ ID NO: 291815 - DNA, 20 bp, synthetic construct
  source 1..20: mol_type = other DNA
catcttctgtggttctgtgg

SEQ ID NO: 291816 - DNA, 20 bp, synthetic construct
  source 1..20: mol_type = other DNA
tcatcttctgtggttctgtg

SEQ ID NO: 291817 - DNA, 20 bp, synthetic construct
  source 1..20: mol_type = other DNA
atcatcttctgtggttctgt

SEQ ID NO: 291818 - DNA, 20 bp, synthetic construct
  source 1..20: mol_type = other DNA
catcatcttctgtggttctg

SEQ ID NO: 291819 - DNA, 20 bp, synthetic construct
  source 1..20: mol_type = other DNA
ccatcatcttctgtggttct

SEQ ID NO: 291820 - DNA, 20 bp, synthetic construct
  source 1..20: mol_type = other DNA
gccatcatcttctgtggttc

SEQ ID NO: 291821 - DNA, 20 bp, synthetic construct
  source 1..20: mol_type = other DNA
tgccatcatcttctgtggtt

SEQ ID NO: 291822 - DNA, 20 bp, synthetic construct
  source 1..20: mol_type = other DNA
ttgccatcatcttctgtggt

SEQ ID NO: 291823 - DNA, 20 bp, synthetic construct
  source 1..20: mol_type = other DNA
cttgccatcatcttctgtgg

SEQ ID NO: 291824 - DNA, 20 bp, synthetic construct
  source 1..20: mol_type = other DNA
tcttgccatcatcttctgtg

SEQ ID NO: 291825 - DNA, 20 bp, synthetic construct
  source 1..20: mol_type = other DNA
atcttgccatcatcttctgt

SEQ ID NO: 291826 - DNA, 20 bp, synthetic construct
  source 1..20: mol_type = other DNA
catcttgccatcatcttctg

SEQ ID NO: 291827 - DNA, 20 bp, synthetic construct
  source 1..20: mol_type = other DNA
gcatcttgccatcatcttct

SEQ ID NO: 291828 - DNA, 20 bp, synthetic construct
  source 1..20: mol_type = other DNA
agcatcttgccatcatcttc

SEQ ID NO: 291829 - DNA, 20 bp, synthetic construct
  source 1..20: mol_type = other DNA
gagcatcttgccatcatctt

SEQ ID NO: 291830 - DNA, 20 bp, synthetic construct
  source 1..20: mol_type = other DNA
agagcatcttgccatcatct

SEQ ID NO: 291831 - DNA, 20 bp, synthetic construct
  source 1..20: mol_type = other DNA
aagagcatcttgccatcatc

SEQ ID NO: 291832 - DNA, 20 bp, synthetic construct
  source 1..20: mol_type = other DNA
caagagcatcttgccatcat

SEQ ID NO: 291833 - DNA, 20 bp, synthetic construct
  source 1..20: mol_type = other DNA
acaagagcatcttgccatca

SEQ ID NO: 291834 - DNA, 20 bp, synthetic construct
  source 1..20: mol_type = other DNA
cacaagagcatcttgccatc

SEQ ID NO: 291835 - DNA, 20 bp, synthetic construct
  source 1..20: mol_type = other DNA
acacaagagcatcttgccat

SEQ ID NO: 291836 - DNA, 20 bp, synthetic construct
  source 1..20: mol_type = other DNA
cacacaagagcatcttgcca

SEQ ID NO: 291837 - DNA, 20 bp, synthetic construct
  source 1..20: mol_type = other DNA
acacacaagagcatcttgcc

SEQ ID NO: 291838 - DNA, 20 bp, synthetic construct
  source 1..20: mol_type = other DNA
cacacacaagagcatcttgc

SEQ ID NO: 291839 - DNA, 20 bp, synthetic construct
  source 1..20: mol_type = other DNA
acacacacaagagcatcttg

SEQ ID NO: 291840 - DNA, 20 bp, synthetic construct
  source 1..20: mol_type = other DNA
aacacacacaagagcatctt

SEQ ID NO: 291841 - DNA, 20 bp, synthetic construct
  source 1..20: mol_type = other DNA
caacacacacaagagcatct

SEQ ID NO: 291842 - DNA, 20 bp, synthetic construct
  source 1..20: mol_type = other DNA
acaacacacacaagagcatc

SEQ ID NO: 291843 - DNA, 20 bp, synthetic construct
  source 1..20: mol_type = other DNA
cacaacacacacaagagcat

SEQ ID NO: 291844 - DNA, 20 bp, synthetic construct
  source 1..20: mol_type = other DNA
acacaacacacacaagagca

SEQ ID NO: 291845 - DNA, 20 bp, synthetic construct
  source 1..20: mol_type = other DNA
aacacaacacacacaagagc

SEQ ID NO: 291846 - DNA, 20 bp, synthetic construct
  source 1..20: mol_type = other DNA
gaacacaacacacacaagag

SEQ ID NO: 291847 - DNA, 20 bp, synthetic construct
  source 1..20: mol_type = other DNA
agaacacaacacacacaaga

SEQ ID NO: 291848 - DNA, 20 bp, synthetic construct
  source 1..20: mol_type = other DNA
tagaacacaacacacacaag

SEQ ID NO: 291849 - DNA, 20 bp, synthetic construct
  source 1..20: mol_type = other DNA
ctagaacacaacacacacaa

SEQ ID NO: 291850 - DNA, 20 bp, synthetic construct
  source 1..20: mol_type = other DNA
cctagaacacaacacacaca

SEQ ID NO: 291851 - DNA, 20 bp, synthetic construct
  source 1..20: mol_type = other DNA
tcctagaacacaacacacac

SEQ ID NO: 291852 - DNA, 20 bp, synthetic construct
  source 1..20: mol_type = other DNA
ctcctagaacacaacacaca

SEQ ID NO: 291853 - DNA, 20 bp, synthetic construct
  source 1..20: mol_type = other DNA
cctcctagaacacaacacac

SEQ ID NO: 291854 - DNA, 20 bp, synthetic construct
  source 1..20: mol_type = other DNA
acctcctagaacacaacaca

SEQ ID NO: 291855 - DNA, 20 bp, synthetic construct
  source 1..20: mol_type = other DNA
cacctcctagaacacaacac

SEQ ID NO: 291856 - DNA, 20 bp, synthetic construct
  source 1..20: mol_type = other DNA
ccacctcctagaacacaaca

SEQ ID NO: 291857 - DNA, 20 bp, synthetic construct
  source 1..20: mol_type = other DNA
gccacctcctagaacacaac

SEQ ID NO: 291858 - DNA, 20 bp, synthetic construct
  source 1..20: mol_type = other DNA
ggccacctcctagaacacaa

SEQ ID NO: 291859 - DNA, 20 bp, synthetic construct
  source 1..20: mol_type = other DNA
tggccacctcctagaacaca

SEQ ID NO: 291860 - DNA, 20 bp, synthetic construct
  source 1..20: mol_type = other DNA
ctggccacctcctagaacac

SEQ ID NO: 291861 - DNA, 20 bp, synthetic construct
  source 1..20: mol_type = other DNA
cctggccacctcctagaaca

SEQ ID NO: 291862 - DNA, 20 bp, synthetic construct
  source 1..20: mol_type = other DNA
acctggccacctcctagaac

SEQ ID NO: 291863 - DNA, 20 bp, synthetic construct
  source 1..20: mol_type = other DNA
cacctggccacctcctagaa

SEQ ID NO: 291864 - DNA, 20 bp, synthetic construct
  source 1..20: mol_type = other DNA
ccacctggccacctcctaga

SEQ ID NO: 291865 - DNA, 20 bp, synthetic construct
  source 1..20: mol_type = other DNA
tccacctggccacctcctag

SEQ ID NO: 291866 - DNA, 20 bp, synthetic construct
  source 1..20: mol_type = other DNA
ttccacctggccacctccta

SEQ ID NO: 291867 - DNA, 20 bp, synthetic construct
  source 1..20: mol_type = other DNA
cttccacctggccacctcct

SEQ ID NO: 291868 - DNA, 20 bp, synthetic construct
  source 1..20: mol_type = other DNA
acttccacctggccacctcc

SEQ ID NO: 291869 - DNA, 20 bp, synthetic construct
  source 1..20: mol_type = other DNA
tacttccacctggccacctc

SEQ ID NO: 291870 - DNA, 20 bp, synthetic construct
  source 1..20: mol_type = other DNA
ttacttccacctggccacct

SEQ ID NO: 291871 - DNA, 20 bp, synthetic construct
  source 1..20: mol_type = other DNA
tttacttccacctggccacc

SEQ ID NO: 291872 - DNA, 20 bp, synthetic construct
  source 1..20: mol_type = other DNA
ttttacttccacctggccac

SEQ ID NO: 291873 - DNA, 20 bp, synthetic construct
  source 1..20: mol_type = other DNA
attttacttccacctggcca

SEQ ID NO: 291874 - DNA, 20 bp, synthetic construct
  source 1..20: mol_type = other DNA
gattttacttccacctggcc

SEQ ID NO: 291875 - DNA, 20 bp, synthetic construct
  source 1..20: mol_type = other DNA
agattttacttccacctggc

SEQ ID NO: 291876 - DNA, 20 bp, synthetic construct
  source 1..20: mol_type = other DNA
cagattttacttccacctgg

SEQ ID NO: 291877 - DNA, 20 bp, synthetic construct
  source 1..20: mol_type = other DNA
tcagattttacttccacctg

SEQ ID NO: 291878 - DNA, 20 bp, synthetic construct
  source 1..20: mol_type = other DNA
ctcagattttacttccacct

SEQ ID NO: 291879 - DNA, 20 bp, synthetic construct
  source 1..20: mol_type = other DNA
tctcagattttacttccacc

SEQ ID NO: 291880 - DNA, 20 bp, synthetic construct
  source 1..20: mol_type = other DNA
ttctcagattttacttccac

SEQ ID NO: 291881 - DNA, 20 bp, synthetic construct
  source 1..20: mol_type = other DNA
cttctcagattttacttcca

SEQ ID NO: 291882 - DNA, 20 bp, synthetic construct
  source 1..20: mol_type = other DNA
gcttctcagattttacttcc

SEQ ID NO: 291883 - DNA, 20 bp, synthetic construct
  source 1..20: mol_type = other DNA
agcttctcagattttacttc

SEQ ID NO: 291884 - DNA, 20 bp, synthetic construct
  source 1..20: mol_type = other DNA
aagcttctcagattttactt

SEQ ID NO: 291885 - DNA, 20 bp, synthetic construct
  source 1..20: mol_type = other DNA
caagcttctcagattttact

SEQ ID NO: 291886 - DNA, 20 bp, synthetic construct
  source 1..20: mol_type = other DNA
tcaagcttctcagattttac

SEQ ID NO: 291887 - DNA, 20 bp, synthetic construct
  source 1..20: mol_type = other DNA
gtcaagcttctcagatttta

SEQ ID NO: 291888 - DNA, 20 bp, synthetic construct
  source 1..20: mol_type = other DNA
agtcaagcttctcagatttt

SEQ ID NO: 291889 - DNA, 20 bp, synthetic construct
  source 1..20: mol_type = other DNA
aagtcaagcttctcagattt

SEQ ID NO: 291890 - DNA, 20 bp, synthetic construct
  source 1..20: mol_type = other DNA
gaagtcaagcttctcagatt

SEQ ID NO: 291891 - DNA, 20 bp, synthetic construct
  source 1..20: mol_type = other DNA
tgaagtcaagcttctcagat

SEQ ID NO: 291892 - DNA, 20 bp, synthetic construct
  source 1..20: mol_type = other DNA
ttgaagtcaagcttctcaga

SEQ ID NO: 291893 - DNA, 20 bp, synthetic construct
  source 1..20: mol_type = other DNA
cttgaagtcaagcttctcag

SEQ ID NO: 291894 - DNA, 20 bp, synthetic construct
  source 1..20: mol_type = other DNA
ccttgaagtcaagcttctca

SEQ ID NO: 291895 - DNA, 20 bp, synthetic construct
  source 1..20: mol_type = other DNA
tccttgaagtcaagcttctc

SEQ ID NO: 291896 - DNA, 20 bp, synthetic construct
  source 1..20: mol_type = other DNA
gtccttgaagtcaagcttct

SEQ ID NO: 291897 - DNA, 20 bp, synthetic construct
  source 1..20: mol_type = other DNA
tgtccttgaagtcaagcttc

SEQ ID NO: 291898 - DNA, 20 bp, synthetic construct
  source 1..20: mol_type = other DNA
ctgtccttgaagtcaagctt

SEQ ID NO: 291899 - DNA, 20 bp, synthetic construct
  source 1..20: mol_type = other DNA
tctgtccttgaagtcaagct

SEQ ID NO: 291900 - DNA, 20 bp, synthetic construct
  source 1..20: mol_type = other DNA
ctctgtccttgaagtcaagc

SEQ ID NO: 291901 - DNA, 20 bp, synthetic construct
  source 1..20: mol_type = other DNA
actctgtccttgaagtcaag

SEQ ID NO: 291902 - DNA, 20 bp, synthetic construct
  source 1..20: mol_type = other DNA
gactctgtccttgaagtcaa

SEQ ID NO: 291903 - DNA, 20 bp, synthetic construct
  source 1..20: mol_type = other DNA
ggactctgtccttgaagtca

SEQ ID NO: 291904 - DNA, 20 bp, synthetic construct
  source 1..20: mol_type = other DNA
tggactctgtccttgaagtc

SEQ ID NO: 291905 - DNA, 20 bp, synthetic construct
  source 1..20: mol_type = other DNA
ctggactctgtccttgaagt

SEQ ID NO: 291906 - DNA, 20 bp, synthetic construct
  source 1..20: mol_type = other DNA
actggactctgtccttgaag

SEQ ID NO: 291907 - DNA, 20 bp, synthetic construct
  source 1..20: mol_type = other DNA
gactggactctgtccttgaa

SEQ ID NO: 291908 - DNA, 20 bp, synthetic construct
  source 1..20: mol_type = other DNA
cgactggactctgtccttga

SEQ ID NO: 291909 - DNA, 20 bp, synthetic construct
  source 1..20: mol_type = other DNA
tcgactggactctgtccttg

SEQ ID NO: 291910 - DNA, 20 bp, synthetic construct
  source 1..20: mol_type = other DNA
ttcgactggactctgtcctt

SEQ ID NO: 291911 - DNA, 20 bp, synthetic construct
  source 1..20: mol_type = other DNA
cttcgactggactctgtcct

SEQ ID NO: 291912 - DNA, 20 bp, synthetic construct
  source 1..20: mol_type = other DNA
tcttcgactggactctgtcc

SEQ ID NO: 291913 - DNA, 20 bp, synthetic construct
  source 1..20: mol_type = other DNA
atcttcgactggactctgtc

SEQ ID NO: 291914 - DNA, 20 bp, synthetic construct
  source 1..20: mol_type = other DNA
aatcttcgactggactctgt

SEQ ID NO: 291915 - DNA, 20 bp, synthetic construct
  source 1..20: mol_type = other DNA
caatcttcgactggactctg

SEQ ID NO: 291916 - DNA, 20 bp, synthetic construct
  source 1..20: mol_type = other DNA
ccaatcttcgactggactct

SEQ ID NO: 291917 - DNA, 20 bp, synthetic construct
  source 1..20: mol_type = other DNA
cccaatcttcgactggactc

SEQ ID NO: 291918 - DNA, 20 bp, synthetic construct
  source 1..20: mol_type = other DNA
acccaatcttcgactggact

SEQ ID NO: 291919 - DNA, 20 bp, synthetic construct
  source 1..20: mol_type = other DNA
gacccaatcttcgactggac

SEQ ID NO: 291920 - DNA, 20 bp, synthetic construct
  source 1..20: mol_type = other DNA
ggacccaatcttcgactgga

SEQ ID NO: 291921 - DNA, 20 bp, synthetic construct
  source 1..20: mol_type = other DNA
gggacccaatcttcgactgg

SEQ ID NO: 291922 - DNA, 20 bp, synthetic construct
  source 1..20: mol_type = other DNA
agggacccaatcttcgactg

SEQ ID NO: 291923 - DNA, 20 bp, synthetic construct
  source 1..20: mol_type = other DNA
cagggacccaatcttcgact

SEQ ID NO: 291924 - DNA, 20 bp, synthetic construct
  source 1..20: mol_type = other DNA
ccagggacccaatcttcgac

SEQ ID NO: 291925 - DNA, 20 bp, synthetic construct
  source 1..20: mol_type = other DNA
tccagggacccaatcttcga

SEQ ID NO: 291926 - DNA, 20 bp, synthetic construct
  source 1..20: mol_type = other DNA
gtccagggacccaatcttcg

SEQ ID NO: 291927 - DNA, 20 bp, synthetic construct
  source 1..20: mol_type = other DNA
tgtccagggacccaatcttc

SEQ ID NO: 291928 - DNA, 20 bp, synthetic construct
  source 1..20: mol_type = other DNA
ttgtccagggacccaatctt

SEQ ID NO: 291929 - DNA, 20 bp, synthetic construct
  source 1..20: mol_type = other DNA
attgtccagggacccaatct

SEQ ID NO: 291930 - DNA, 20 bp, synthetic construct
  source 1..20: mol_type = other DNA
tattgtccagggacccaatc

SEQ ID NO: 291931 - DNA, 20 bp, synthetic construct
  source 1..20: mol_type = other DNA
atattgtccagggacccaat

SEQ ID NO: 291932 - DNA, 20 bp, synthetic construct
  source 1..20: mol_type = other DNA
gatattgtccagggacccaa

SEQ ID NO: 291933 - DNA, 20 bp, synthetic construct
  source 1..20: mol_type = other DNA
tgatattgtccagggaccca

SEQ ID NO: 291934 - DNA, 20 bp, synthetic construct
  source 1..20: mol_type = other DNA
gtgatattgtccagggaccc

SEQ ID NO: 291935 - DNA, 20 bp, synthetic construct
  source 1..20: mol_type = other DNA
ggtgatattgtccagggacc

SEQ ID NO: 291936 - DNA, 20 bp, synthetic construct
  source 1..20: mol_type = other DNA
gggtgatattgtccagggac

SEQ ID NO: 291937 - DNA, 20 bp, synthetic construct
  source 1..20: mol_type = other DNA
tgggtgatattgtccaggga

SEQ ID NO: 291938 - DNA, 20 bp, synthetic construct
  source 1..20: mol_type = other DNA
gtgggtgatattgtccaggg

SEQ ID NO: 291939 - DNA, 20 bp, synthetic construct
  source 1..20: mol_type = other DNA
cgtgggtgatattgtccagg

SEQ ID NO: 291940 - DNA, 20 bp, synthetic construct
  source 1..20: mol_type = other DNA
acgtgggtgatattgtccag

SEQ ID NO: 291941 - DNA, 20 bp, synthetic construct
  source 1..20: mol_type = other DNA
gacgtgggtgatattgtcca

SEQ ID NO: 291942 - DNA, 20 bp, synthetic construct
  source 1..20: mol_type = other DNA
ggacgtgggtgatattgtcc

SEQ ID NO: 291943 - DNA, 20 bp, synthetic construct
  source 1..20: mol_type = other DNA
gggacgtgggtgatattgtc

SEQ ID NO: 291944 - DNA, 20 bp, synthetic construct
  source 1..20: mol_type = other DNA
agggacgtgggtgatattgt

SEQ ID NO: 291945 - DNA, 20 bp, synthetic construct
  source 1..20: mol_type = other DNA
cagggacgtgggtgatattg

SEQ ID NO: 291946 - DNA, 20 bp, synthetic construct
  source 1..20: mol_type = other DNA
ccagggacgtgggtgatatt

SEQ ID NO: 291947 - DNA, 20 bp, synthetic construct
  source 1..20: mol_type = other DNA
gccagggacgtgggtgatat

SEQ ID NO: 291948 - DNA, 20 bp, synthetic construct
  source 1..20: mol_type = other DNA
cgccagggacgtgggtgata

SEQ ID NO: 291949 - DNA, 20 bp, synthetic construct
  source 1..20: mol_type = other DNA
ccgccagggacgtgggtgat

SEQ ID NO: 291950 - DNA, 20 bp, synthetic construct
  source 1..20: mol_type = other DNA
tccgccagggacgtgggtga

SEQ ID NO: 291951 - DNA, 20 bp, synthetic construct
  source 1..20: mol_type = other DNA
ctccgccagggacgtgggtg

SEQ ID NO: 291952 - DNA, 20 bp, synthetic construct
  source 1..20: mol_type = other DNA
cctccgccagggacgtgggt

SEQ ID NO: 291953 - DNA, 20 bp, synthetic construct
  source 1..20: mol_type = other DNA
tcctccgccagggacgtggg

SEQ ID NO: 291954 - DNA, 20 bp, synthetic construct
  source 1..20: mol_type = other DNA
ttcctccgccagggacgtgg

SEQ ID NO: 291955 - DNA, 20 bp, synthetic construct
  source 1..20: mol_type = other DNA
tttcctccgccagggacgtg

SEQ ID NO: 291956 - DNA, 20 bp, synthetic construct
  source 1..20: mol_type = other DNA
atttcctccgccagggacgt

SEQ ID NO: 291957 - DNA, 20 bp, synthetic construct
  source 1..20: mol_type = other DNA
tatttcctccgccagggacg

SEQ ID NO: 291958 - DNA, 20 bp, synthetic construct
  source 1..20: mol_type = other DNA
ttatttcctccgccagggac

SEQ ID NO: 291959 - DNA, 20 bp, synthetic construct
  source 1..20: mol_type = other DNA
tttatttcctccgccaggga

SEQ ID NO: 291960 - DNA, 20 bp, synthetic construct
  source 1..20: mol_type = other DNA
ttttatttcctccgccaggg

SEQ ID NO: 291961 - DNA, 20 bp, synthetic construct
  source 1..20: mol_type = other DNA
tttttatttcctccgccagg

SEQ ID NO: 291962 - DNA, 20 bp, synthetic construct
  source 1..20: mol_type = other DNA
ctttttatttcctccgccag

SEQ ID NO: 291963 - DNA, 20 bp, synthetic construct
  source 1..20: mol_type = other DNA
cctttttatttcctccgcca

SEQ ID NO: 291964 - DNA, 20 bp, synthetic construct
  source 1..20: mol_type = other DNA
acctttttatttcctccgcc

SEQ ID NO: 291965 - DNA, 20 bp, synthetic construct
  source 1..20: mol_type = other DNA
tacctttttatttcctccgc

SEQ ID NO: 291966 - DNA, 20 bp, synthetic construct
  source 1..20: mol_type = other DNA
ttacctttttatttcctccg

SEQ ID NO: 291967 - DNA, 20 bp, synthetic construct
  source 1..20: mol_type = other DNA
tttacctttttatttcctcc

SEQ ID NO: 291968 - DNA, 20 bp, synthetic construct
  source 1..20: mol_type = other DNA
ctttacctttttatttcctc

SEQ ID NO: 291969 - DNA, 20 bp, synthetic construct
  source 1..20: mol_type = other DNA
cctttacctttttatttcct

SEQ ID NO: 291970 - DNA, 20 bp, synthetic construct
  source 1..20: mol_type = other DNA
ccctttacctttttatttcc

SEQ ID NO: 291971 - DNA, 20 bp, synthetic construct
  source 1..20: mol_type = other DNA
cccctttacctttttatttc

SEQ ID NO: 291972 - DNA, 20 bp, synthetic construct
  source 1..20: mol_type = other DNA
ccccctttacctttttattt

SEQ ID NO: 291973 - DNA, 20 bp, synthetic construct
  source 1..20: mol_type = other DNA
accccctttacctttttatt

SEQ ID NO: 291974 - DNA, 20 bp, synthetic construct
  source 1..20: mol_type = other DNA
taccccctttacctttttat

SEQ ID NO: 291975 - DNA, 20 bp, synthetic construct
  source 1..20: mol_type = other DNA
ctaccccctttaccttttta

SEQ ID NO: 291976 - DNA, 20 bp, synthetic construct
  source 1..20: mol_type = other DNA
cctaccccctttaccttttt

SEQ ID NO: 291977 - DNA, 20 bp, synthetic construct
  source 1..20: mol_type = other DNA
ccctaccccctttacctttt

SEQ ID NO: 291978 - DNA, 20 bp, synthetic construct
  source 1..20: mol_type = other DNA
accctaccccctttaccttt

SEQ ID NO: 291979 - DNA, 20 bp, synthetic construct
  source 1..20: mol_type = other DNA
caccctaccccctttacctt

SEQ ID NO: 291980 - DNA, 20 bp, synthetic construct
  source 1..20: mol_type = other DNA
ccaccctaccccctttacct

SEQ ID NO: 291981 - DNA, 20 bp, synthetic construct
  source 1..20: mol_type = other DNA
cccaccctaccccctttacc

SEQ ID NO: 291982 - DNA, 20 bp, synthetic construct
  source 1..20: mol_type = other DNA
acccaccctaccccctttac

SEQ ID NO: 291983 - DNA, 20 bp, synthetic construct
  source 1..20: mol_type = other DNA
aacccaccctacccccttta

SEQ ID NO: 291984 - DNA, 20 bp, synthetic construct
  source 1..20: mol_type = other DNA
caacccaccctacccccttt

SEQ ID NO: 291985 - DNA, 20 bp, synthetic construct
  source 1..20: mol_type = other DNA
ccaacccaccctaccccctt

SEQ ID NO: 291986 - DNA, 20 bp, synthetic construct
  source 1..20: mol_type = other DNA
tccaacccaccctaccccct

SEQ ID NO: 291987 - DNA, 20 bp, synthetic construct
  source 1..20: mol_type = other DNA
atccaacccaccctaccccc

SEQ ID NO: 291988 - DNA, 20 bp, synthetic construct
  source 1..20: mol_type = other DNA
catccaacccaccctacccc

SEQ ID NO: 291989 - DNA, 20 bp, synthetic construct
  source 1..20: mol_type = other DNA
gcatccaacccaccctaccc

SEQ ID NO: 291990 - DNA, 20 bp, synthetic construct
  source 1..20: mol_type = other DNA
agcatccaacccaccctacc

SEQ ID NO: 291991 - DNA, 20 bp, synthetic construct
  source 1..20: mol_type = other DNA
cagcatccaacccaccctac

SEQ ID NO: 291992 - DNA, 20 bp, synthetic construct
  source 1..20: mol_type = other DNA
gcagcatccaacccacccta

SEQ ID NO: 291993 - DNA, 20 bp, synthetic construct
  source 1..20: mol_type = other DNA
ggcagcatccaacccaccct

SEQ ID NO: 291994 - DNA, 20 bp, synthetic construct
  source 1..20: mol_type = other DNA
gggcagcatccaacccaccc

SEQ ID NO: 291995 - DNA, 20 bp, synthetic construct
  source 1..20: mol_type = other DNA
agggcagcatccaacccacc

SEQ ID NO: 291996 - DNA, 20 bp, synthetic construct
  source 1..20: mol_type = other DNA
aagggcagcatccaacccac

SEQ ID NO: 291997 - DNA, 20 bp, synthetic construct
  source 1..20: mol_type = other DNA
caagggcagcatccaaccca

SEQ ID NO: 291998 - DNA, 20 bp, synthetic construct
  source 1..20: mol_type = other DNA
ccaagggcagcatccaaccc

SEQ ID NO: 291999 - DNA, 20 bp, synthetic construct
  source 1..20: mol_type = other DNA
cccaagggcagcatccaacc

SEQ ID NO: 292000 - DNA, 20 bp, synthetic construct
  source 1..20: mol_type = other DNA
acccaagggcagcatccaac

SEQ ID NO: 292001 - DNA, 20 bp, synthetic construct
  source 1..20: mol_type = other DNA
tacccaagggcagcatccaa

SEQ ID NO: 292002 - DNA, 20 bp, synthetic construct
  source 1..20: mol_type = other DNA
atacccaagggcagcatcca

SEQ ID NO: 292003 - DNA, 20 bp, synthetic construct
  source 1..20: mol_type = other DNA
tatacccaagggcagcatcc

SEQ ID NO: 292004 - DNA, 20 bp, synthetic construct
  source 1..20: mol_type = other DNA
atatacccaagggcagcatc

SEQ ID NO: 292005 - DNA, 20 bp, synthetic construct
  source 1..20: mol_type = other DNA
catatacccaagggcagcat

SEQ ID NO: 292006 - DNA, 20 bp, synthetic construct
  source 1..20: mol_type = other DNA
ccatatacccaagggcagca

SEQ ID NO: 292007 - DNA, 20 bp, synthetic construct
  source 1..20: mol_type = other DNA
cccatatacccaagggcagc

SEQ ID NO: 292008 - DNA, 20 bp, synthetic construct
  source 1..20: mol_type = other DNA
gcccatatacccaagggcag

SEQ ID NO: 292009 - DNA, 20 bp, synthetic construct
  source 1..20: mol_type = other DNA
tgcccatatacccaagggca

SEQ ID NO: 292010 - DNA, 20 bp, synthetic construct
  source 1..20: mol_type = other DNA
atgcccatatacccaagggc

SEQ ID NO: 292011 - DNA, 20 bp, synthetic construct
  source 1..20: mol_type = other DNA
aatgcccatatacccaaggg

SEQ ID NO: 292012 - DNA, 20 bp, synthetic construct
  source 1..20: mol_type = other DNA
taatgcccatatacccaagg

SEQ ID NO: 292013 - DNA, 20 bp, synthetic construct
  source 1..20: mol_type = other DNA
ttaatgcccatatacccaag

SEQ ID NO: 292014 - DNA, 20 bp, synthetic construct
  source 1..20: mol_type = other DNA
attaatgcccatatacccaa

SEQ ID NO: 292015 - DNA, 20 bp, synthetic construct
  source 1..20: mol_type = other DNA
gattaatgcccatataccca

SEQ ID NO: 292016 - DNA, 20 bp, synthetic construct
  source 1..20: mol_type = other DNA
tgattaatgcccatataccc

SEQ ID NO: 292017 - DNA, 20 bp, synthetic construct
  source 1..20: mol_type = other DNA
ttgattaatgcccatatacc

SEQ ID NO: 292018 - DNA, 20 bp, synthetic construct
  source 1..20: mol_type = other DNA
cttgattaatgcccatatac

SEQ ID NO: 292019 - DNA, 20 bp, synthetic construct
  source 1..20: mol_type = other DNA
acttgattaatgcccatata

SEQ ID NO: 292020 - DNA, 20 bp, synthetic construct
  source 1..20: mol_type = other DNA
aacttgattaatgcccatat

SEQ ID NO: 292021 - DNA, 20 bp, synthetic construct
  source 1..20: mol_type = other DNA
caacttgattaatgcccata

SEQ ID NO: 292022 - DNA, 20 bp, synthetic construct
  source 1..20: mol_type = other DNA
tcaacttgattaatgcccat

SEQ ID NO: 292023 - DNA, 20 bp, synthetic construct
  source 1..20: mol_type = other DNA
ctcaacttgattaatgccca

SEQ ID NO: 292024 - DNA, 20 bp, synthetic construct
  source 1..20: mol_type = other DNA
actcaacttgattaatgccc

SEQ ID NO: 292025 - DNA, 20 bp, synthetic construct
  source 1..20: mol_type = other DNA
cactcaacttgattaatgcc

SEQ ID NO: 292026 - DNA, 20 bp, synthetic construct
  source 1..20: mol_type = other DNA
ccactcaacttgattaatgc

SEQ ID NO: 292027 - DNA, 20 bp, synthetic construct
  source 1..20: mol_type = other DNA
tccactcaacttgattaatg

SEQ ID NO: 292028 - DNA, 20 bp, synthetic construct
  source 1..20: mol_type = other DNA
gtccactcaacttgattaat

SEQ ID NO: 292029 - DNA, 20 bp, synthetic construct
  source 1..20: mol_type = other DNA
tgtccactcaacttgattaa

SEQ ID NO: 292030 - DNA, 20 bp, synthetic construct
  source 1..20: mol_type = other DNA
ttgtccactcaacttgatta

SEQ ID NO: 292031 - DNA, 20 bp, synthetic construct
  source 1..20: mol_type = other DNA
tttgtccactcaacttgatt

SEQ ID NO: 292032 - DNA, 20 bp, synthetic construct
  source 1..20: mol_type = other DNA
ctttgtccactcaacttgat

SEQ ID NO: 292033 - DNA, 20 bp, synthetic construct
  source 1..20: mol_type = other DNA
cctttgtccactcaacttga

SEQ ID NO: 292034 - DNA, 20 bp, synthetic construct
  source 1..20: mol_type = other DNA
gcctttgtccactcaacttg

SEQ ID NO: 292035 - DNA, 20 bp, synthetic construct
  source 1..20: mol_type = other DNA
agcctttgtccactcaactt

SEQ ID NO: 292036 - DNA, 20 bp, synthetic construct
  source 1..20: mol_type = other DNA
cagcctttgtccactcaact

SEQ ID NO: 292037 - DNA, 20 bp, synthetic construct
  source 1..20: mol_type = other DNA
ccagcctttgtccactcaac

SEQ ID NO: 292038 - DNA, 20 bp, synthetic construct
  source 1..20: mol_type = other DNA
accagcctttgtccactcaa

SEQ ID NO: 292039 - DNA, 20 bp, synthetic construct
  source 1..20: mol_type = other DNA
gaccagcctttgtccactca

SEQ ID NO: 292040 - DNA, 20 bp, synthetic construct
  source 1..20: mol_type = other DNA
ggaccagcctttgtccactc

SEQ ID NO: 292041 - DNA, 20 bp, synthetic construct
  source 1..20: mol_type = other DNA
tggaccagcctttgtccact

SEQ ID NO: 292042 - DNA, 20 bp, synthetic construct
  source 1..20: mol_type = other DNA
ctggaccagcctttgtccac

SEQ ID NO: 292043 - DNA, 20 bp, synthetic construct
  source 1..20: mol_type = other DNA
actggaccagcctttgtcca

SEQ ID NO: 292044 - DNA, 20 bp, synthetic construct
  source 1..20: mol_type = other DNA
aactggaccagcctttgtcc

SEQ ID NO: 292045 - DNA, 20 bp, synthetic construct
  source 1..20: mol_type = other DNA
gaactggaccagcctttgtc

SEQ ID NO: 292046 - DNA, 20 bp, synthetic construct
  source 1..20: mol_type = other DNA
ggaactggaccagcctttgt

SEQ ID NO: 292047 - DNA, 20 bp, synthetic construct
  source 1..20: mol_type = other DNA
gggaactggaccagcctttg

SEQ ID NO: 292048 - DNA, 20 bp, synthetic construct
  source 1..20: mol_type = other DNA
tgggaactggaccagccttt

SEQ ID NO: 292049 - DNA, 20 bp, synthetic construct
  source 1..20: mol_type = other DNA
ctgggaactggaccagcctt

SEQ ID NO: 292050 - DNA, 20 bp, synthetic construct
  source 1..20: mol_type = other DNA
tctgggaactggaccagcct

SEQ ID NO: 292051 - DNA, 20 bp, synthetic construct
  source 1..20: mol_type = other DNA
ctctgggaactggaccagcc

SEQ ID NO: 292052 - DNA, 20 bp, synthetic construct
  source 1..20: mol_type = other DNA
cctctgggaactggaccagc

SEQ ID NO: 292053 - DNA, 20 bp, synthetic construct
  source 1..20: mol_type = other DNA
tcctctgggaactggaccag

SEQ ID NO: 292054 - DNA, 20 bp, synthetic construct
  source 1..20: mol_type = other DNA
ctcctctgggaactggacca

SEQ ID NO: 292055 - DNA, 20 bp, synthetic construct
  source 1..20: mol_type = other DNA
cctcctctgggaactggacc

SEQ ID NO: 292056 - DNA, 20 bp, synthetic construct
  source 1..20: mol_type = other DNA
tcctcctctgggaactggac

SEQ ID NO: 292057 - DNA, 20 bp, synthetic construct
  source 1..20: mol_type = other DNA
ttcctcctctgggaactgga

SEQ ID NO: 292058 - DNA, 20 bp, synthetic construct
  source 1..20: mol_type = other DNA
tttcctcctctgggaactgg

SEQ ID NO: 292059 - DNA, 20 bp, synthetic construct
  source 1..20: mol_type = other DNA
ttttcctcctctgggaactg

SEQ ID NO: 292060 - DNA, 20 bp, synthetic construct
  source 1..20: mol_type = other DNA
gttttcctcctctgggaact

SEQ ID NO: 292061 - DNA, 20 bp, synthetic construct
  source 1..20: mol_type = other DNA
tgttttcctcctctgggaac

SEQ ID NO: 292062 - DNA, 20 bp, synthetic construct
  source 1..20: mol_type = other DNA
ctgttttcctcctctgggaa

SEQ ID NO: 292063 - DNA, 20 bp, synthetic construct
  source 1..20: mol_type = other DNA
tctgttttcctcctctggga

SEQ ID NO: 292064 - DNA, 20 bp, synthetic construct
  source 1..20: mol_type = other DNA
ctctgttttcctcctctggg

SEQ ID NO: 292065 - DNA, 20 bp, synthetic construct
  source 1..20: mol_type = other DNA
cctctgttttcctcctctgg

SEQ ID NO: 292066 - DNA, 20 bp, synthetic construct
  source 1..20: mol_type = other DNA
gcctctgttttcctcctctg

SEQ ID NO: 292067 - DNA, 20 bp, synthetic construct
  source 1..20: mol_type = other DNA
agcctctgttttcctcctct

SEQ ID NO: 292068 - DNA, 20 bp, synthetic construct
  source 1..20: mol_type = other DNA
aagcctctgttttcctcctc

SEQ ID NO: 292069 - DNA, 20 bp, synthetic construct
  source 1..20: mol_type = other DNA
gaagcctctgttttcctcct

SEQ ID NO: 292070 - DNA, 20 bp, synthetic construct
  source 1..20: mol_type = other DNA
agaagcctctgttttcctcc

SEQ ID NO: 292071 - DNA, 20 bp, synthetic construct
  source 1..20: mol_type = other DNA
cagaagcctctgttttcctc

SEQ ID NO: 292072 - DNA, 20 bp, synthetic construct
  source 1..20: mol_type = other DNA
acagaagcctctgttttcct

SEQ ID NO: 292073 - DNA, 20 bp, synthetic construct
  source 1..20: mol_type = other DNA
cacagaagcctctgttttcc

SEQ ID NO: 292074 - DNA, 20 bp, synthetic construct
  source 1..20: mol_type = other DNA
acacagaagcctctgttttc

SEQ ID NO: 292075 - DNA, 20 bp, synthetic construct
  source 1..20: mol_type = other DNA
aacacagaagcctctgtttt

SEQ ID NO: 292076 - DNA, 20 bp, synthetic construct
  source 1..20: mol_type = other DNA
caacacagaagcctctgttt

SEQ ID NO: 292077 - DNA, 20 bp, synthetic construct
  source 1..20: mol_type = other DNA
tcaacacagaagcctctgtt

SEQ ID NO: 292078 - DNA, 20 bp, synthetic construct
  source 1..20: mol_type = other DNA
gtcaacacagaagcctctgt

SEQ ID NO: 292079 - DNA, 20 bp, synthetic construct
  source 1..20: mol_type = other DNA
agtcaacacagaagcctctg

SEQ ID NO: 292080 - DNA, 20 bp, synthetic construct
  source 1..20: mol_type = other DNA
cagtcaacacagaagcctct

SEQ ID NO: 292081 - DNA, 20 bp, synthetic construct
  source 1..20: mol_type = other DNA
ccagtcaacacagaagcctc

SEQ ID NO: 292082 - DNA, 20 bp, synthetic construct
  source 1..20: mol_type = other DNA
gccagtcaacacagaagcct

SEQ ID NO: 292083 - DNA, 20 bp, synthetic construct
  source 1..20: mol_type = other DNA
agccagtcaacacagaagcc

SEQ ID NO: 292084 - DNA, 20 bp, synthetic construct
  source 1..20: mol_type = other DNA
cagccagtcaacacagaagc

SEQ ID NO: 292085 - DNA, 20 bp, synthetic construct
  source 1..20: mol_type = other DNA
ccagccagtcaacacagaag

SEQ ID NO: 292086 - DNA, 20 bp, synthetic construct
  source 1..20: mol_type = other DNA
tccagccagtcaacacagaa

SEQ ID NO: 292087 - DNA, 20 bp, synthetic construct
  source 1..20: mol_type = other DNA
atccagccagtcaacacaga

SEQ ID NO: 292088 - DNA, 20 bp, synthetic construct
  source 1..20: mol_type = other DNA
catccagccagtcaacacag

SEQ ID NO: 292089 - DNA, 20 bp, synthetic construct
  source 1..20: mol_type = other DNA
acatccagccagtcaacaca

SEQ ID NO: 292090 - DNA, 20 bp, synthetic construct
  source 1..20: mol_type = other DNA
cacatccagccagtcaacac

SEQ ID NO: 292091 - DNA, 20 bp, synthetic construct
  source 1..20: mol_type = other DNA
ccacatccagccagtcaaca

SEQ ID NO: 292092 - DNA, 20 bp, synthetic construct
  source 1..20: mol_type = other DNA
cccacatccagccagtcaac

SEQ ID NO: 292093 - DNA, 20 bp, synthetic construct
  source 1..20: mol_type = other DNA
gcccacatccagccagtcaa

SEQ ID NO: 292094 - DNA, 20 bp, synthetic construct
  source 1..20: mol_type = other DNA
ggcccacatccagccagtca

SEQ ID NO: 292095 - DNA, 20 bp, synthetic construct
  source 1..20: mol_type = other DNA
gggcccacatccagccagtc

SEQ ID NO: 292096 - DNA, 20 bp, synthetic construct
  source 1..20: mol_type = other DNA
agggcccacatccagccagt

SEQ ID NO: 292097 - DNA, 20 bp, synthetic construct
  source 1..20: mol_type = other DNA
gagggcccacatccagccag

SEQ ID NO: 292098 - DNA, 20 bp, synthetic construct
  source 1..20: mol_type = other DNA
tgagggcccacatccagcca

SEQ ID NO: 292099 - DNA, 20 bp, synthetic construct
  source 1..20: mol_type = other DNA
ctgagggcccacatccagcc

SEQ ID NO: 292100 - DNA, 20 bp, synthetic construct
  source 1..20: mol_type = other DNA
gctgagggcccacatccagc

SEQ ID NO: 292101 - DNA, 20 bp, synthetic construct
  source 1..20: mol_type = other DNA
tgctgagggcccacatccag

SEQ ID NO: 292102 - DNA, 20 bp, synthetic construct
  source 1..20: mol_type = other DNA
ctgctgagggcccacatcca

SEQ ID NO: 292103 - DNA, 20 bp, synthetic construct
  source 1..20: mol_type = other DNA
gctgctgagggcccacatcc

SEQ ID NO: 292104 - DNA, 20 bp, synthetic construct
  source 1..20: mol_type = other DNA
tgctgctgagggcccacatc

SEQ ID NO: 292105 - DNA, 20 bp, synthetic construct
  source 1..20: mol_type = other DNA
atgctgctgagggcccacat

SEQ ID NO: 292106 - DNA, 20 bp, synthetic construct
  source 1..20: mol_type = other DNA
gatgctgctgagggcccaca

SEQ ID NO: 292107 - DNA, 20 bp, synthetic construct
  source 1..20: mol_type = other DNA
ggatgctgctgagggcccac

SEQ ID NO: 292108 - DNA, 20 bp, synthetic construct
  source 1..20: mol_type = other DNA
tggatgctgctgagggccca

SEQ ID NO: 292109 - DNA, 20 bp, synthetic construct
  source 1..20: mol_type = other DNA
ctggatgctgctgagggccc

SEQ ID NO: 292110 - DNA, 20 bp, synthetic construct
  source 1..20: mol_type = other DNA
actggatgctgctgagggcc

SEQ ID NO: 292111 - DNA, 20 bp, synthetic construct
  source 1..20: mol_type = other DNA
cactggatgctgctgagggc

SEQ ID NO: 292112 - DNA, 20 bp, synthetic construct
  source 1..20: mol_type = other DNA
ccactggatgctgctgaggg

SEQ ID NO: 292113 - DNA, 20 bp, synthetic construct
  source 1..20: mol_type = other DNA
cccactggatgctgctgagg

SEQ ID NO: 292114 - DNA, 20 bp, synthetic construct
  source 1..20: mol_type = other DNA
acccactggatgctgctgag

SEQ ID NO: 292115 - DNA, 20 bp, synthetic construct
  source 1..20: mol_type = other DNA
gacccactggatgctgctga

SEQ ID NO: 292116 - DNA, 20 bp, synthetic construct
  source 1..20: mol_type = other DNA
agacccactggatgctgctg

SEQ ID NO: 292117 - DNA, 20 bp, synthetic construct
  source 1..20: mol_type = other DNA
gagacccactggatgctgct

SEQ ID NO: 292118 - DNA, 20 bp, synthetic construct
  source 1..20: mol_type = other DNA
ggagacccactggatgctgc

SEQ ID NO: 292119 - DNA, 20 bp, synthetic construct
  source 1..20: mol_type = other DNA
tggagacccactggatgctg

SEQ ID NO: 292120 - DNA, 20 bp, synthetic construct
  source 1..20: mol_type = other DNA
gtggagacccactggatgct

SEQ ID NO: 292121 - DNA, 20 bp, synthetic construct
  source 1..20: mol_type = other DNA
agtggagacccactggatgc

SEQ ID NO: 292122 - DNA, 20 bp, synthetic construct
  source 1..20: mol_type = other DNA
cagtggagacccactggatg

SEQ ID NO: 292123 - DNA, 20 bp, synthetic construct
  source 1..20: mol_type = other DNA
gcagtggagacccactggat

SEQ ID NO: 292124 - DNA, 20 bp, synthetic construct
  source 1..20: mol_type = other DNA
ggcagtggagacccactgga

SEQ ID NO: 292125 - DNA, 20 bp, synthetic construct
  source 1..20: mol_type = other DNA
aggcagtggagacccactgg

SEQ ID NO: 292126 - DNA, 20 bp, synthetic construct
  source 1..20: mol_type = other DNA
caggcagtggagacccactg

SEQ ID NO: 292127 - DNA, 20 bp, synthetic construct
  source 1..20: mol_type = other DNA
acaggcagtggagacccact

SEQ ID NO: 292128 - DNA, 20 bp, synthetic construct
  source 1..20: mol_type = other DNA
gacaggcagtggagacccac

SEQ ID NO: 292129 - DNA, 20 bp, synthetic construct
  source 1..20: mol_type = other DNA
agacaggcagtggagaccca

SEQ ID NO: 292130 - DNA, 20 bp, synthetic construct
  source 1..20: mol_type = other DNA
gagacaggcagtggagaccc

SEQ ID NO: 292131 - DNA, 20 bp, synthetic construct
  source 1..20: mol_type = other DNA
tgagacaggcagtggagacc

SEQ ID NO: 292132 - DNA, 20 bp, synthetic construct
  source 1..20: mol_type = other DNA
ttgagacaggcagtggagac

SEQ ID NO: 292133 - DNA, 20 bp, synthetic construct
  source 1..20: mol_type = other DNA
attgagacaggcagtggaga

SEQ ID NO: 292134 - DNA, 20 bp, synthetic construct
  source 1..20: mol_type = other DNA
gattgagacaggcagtggag

SEQ ID NO: 292135 - DNA, 20 bp, synthetic construct
  source 1..20: mol_type = other DNA
tgattgagacaggcagtgga

SEQ ID NO: 292136 - DNA, 20 bp, synthetic construct
  source 1..20: mol_type = other DNA
gtgattgagacaggcagtgg

SEQ ID NO: 292137 - DNA, 20 bp, synthetic construct
  source 1..20: mol_type = other DNA
ggtgattgagacaggcagtg

SEQ ID NO: 292138 - DNA, 20 bp, synthetic construct
  source 1..20: mol_type = other DNA
aggtgattgagacaggcagt

SEQ ID NO: 292139 - DNA, 20 bp, synthetic construct
  source 1..20: mol_type = other DNA
caggtgattgagacaggcag

SEQ ID NO: 292140 - DNA, 20 bp, synthetic construct
  source 1..20: mol_type = other DNA
ccaggtgattgagacaggca

SEQ ID NO: 292141 - DNA, 20 bp, synthetic construct
  source 1..20: mol_type = other DNA
tccaggtgattgagacaggc

SEQ ID NO: 292142 - DNA, 20 bp, synthetic construct
  source 1..20: mol_type = other DNA
ctccaggtgattgagacagg

SEQ ID NO: 292143 - DNA, 20 bp, synthetic construct
  source 1..20: mol_type = other DNA
gctccaggtgattgagacag

SEQ ID NO: 292144 - DNA, 20 bp, synthetic construct
  source 1..20: mol_type = other DNA
agctccaggtgattgagaca

SEQ ID NO: 292145 - DNA, 20 bp, synthetic construct
  source 1..20: mol_type = other DNA
aagctccaggtgattgagac

SEQ ID NO: 292146 - DNA, 20 bp, synthetic construct
  source 1..20: mol_type = other DNA
aaagctccaggtgattgaga

SEQ ID NO: 292147 - DNA, 20 bp, synthetic construct
  source 1..20: mol_type = other DNA
taaagctccaggtgattgag

SEQ ID NO: 292148 - DNA, 20 bp, synthetic construct
  source 1..20: mol_type = other DNA
ctaaagctccaggtgattga

SEQ ID NO: 292149 - DNA, 20 bp, synthetic construct
  source 1..20: mol_type = other DNA
gctaaagctccaggtgattg

SEQ ID NO: 292150 - DNA, 20 bp, synthetic construct
  source 1..20: mol_type = other DNA
tgctaaagctccaggtgatt

SEQ ID NO: 292151 - DNA, 20 bp, synthetic construct
  source 1..20: mol_type = other DNA
gtgctaaagctccaggtgat

SEQ ID NO: 292152 - DNA, 20 bp, synthetic construct
  source 1..20: mol_type = other DNA
cgtgctaaagctccaggtga

SEQ ID NO: 292153 - DNA, 20 bp, synthetic construct
  source 1..20: mol_type = other DNA
acgtgctaaagctccaggtg

SEQ ID NO: 292154 - DNA, 20 bp, synthetic construct
  source 1..20: mol_type = other DNA
aacgtgctaaagctccaggt

SEQ ID NO: 292155 - DNA, 20 bp, synthetic construct
  source 1..20: mol_type = other DNA
aaacgtgctaaagctccagg

SEQ ID NO: 292156 - DNA, 20 bp, synthetic construct
  source 1..20: mol_type = other DNA
gaaacgtgctaaagctccag

SEQ ID NO: 292157 - DNA, 20 bp, synthetic construct
  source 1..20: mol_type = other DNA
tgaaacgtgctaaagctcca

SEQ ID NO: 292158 - DNA, 20 bp, synthetic construct
  source 1..20: mol_type = other DNA
gtgaaacgtgctaaagctcc

SEQ ID NO: 292159 - DNA, 20 bp, synthetic construct
  source 1..20: mol_type = other DNA
tgtgaaacgtgctaaagctc

SEQ ID NO: 292160 - DNA, 20 bp, synthetic construct
  source 1..20: mol_type = other DNA
gtgtgaaacgtgctaaagct

SEQ ID NO: 292161 - DNA, 20 bp, synthetic construct
  source 1..20: mol_type = other DNA
ggtgtgaaacgtgctaaagc

SEQ ID NO: 292162 - DNA, 20 bp, synthetic construct
  source 1..20: mol_type = other DNA
aggtgtgaaacgtgctaaag

SEQ ID NO: 292163 - DNA, 20 bp, synthetic construct
  source 1..20: mol_type = other DNA
caggtgtgaaacgtgctaaa

SEQ ID NO: 292164 - DNA, 20 bp, synthetic construct
  source 1..20: mol_type = other DNA
ccaggtgtgaaacgtgctaa

SEQ ID NO: 292165 - DNA, 20 bp, synthetic construct
  source 1..20: mol_type = other DNA
cccaggtgtgaaacgtgcta

SEQ ID NO: 292166 - DNA, 20 bp, synthetic construct
  source 1..20: mol_type = other DNA
gcccaggtgtgaaacgtgct

SEQ ID NO: 292167 - DNA, 20 bp, synthetic construct
  source 1..20: mol_type = other DNA
ggcccaggtgtgaaacgtgc

SEQ ID NO: 292168 - DNA, 20 bp, synthetic construct
  source 1..20: mol_type = other DNA
gggcccaggtgtgaaacgtg

SEQ ID NO: 292169 - DNA, 20 bp, synthetic construct
  source 1..20: mol_type = other DNA
ggggcccaggtgtgaaacgt

SEQ ID NO: 292170 - DNA, 20 bp, synthetic construct
  source 1..20: mol_type = other DNA
tggggcccaggtgtgaaacg

SEQ ID NO: 292171 - DNA, 20 bp, synthetic construct
  source 1..20: mol_type = other DNA
ttggggcccaggtgtgaaac

SEQ ID NO: 292172 - DNA, 20 bp, synthetic construct
  source 1..20: mol_type = other DNA
gttggggcccaggtgtgaaa

SEQ ID NO: 292173 - DNA, 20 bp, synthetic construct
  source 1..20: mol_type = other DNA
ggttggggcccaggtgtgaa

SEQ ID NO: 292174 - DNA, 20 bp, synthetic construct
  source 1..20: mol_type = other DNA
aggttggggcccaggtgtga

SEQ ID NO: 292175 - DNA, 20 bp, synthetic construct
  source 1..20: mol_type = other DNA
caggttggggcccaggtgtg

SEQ ID NO: 292176 - DNA, 20 bp, synthetic construct
  source 1..20: mol_type = other DNA
ccaggttggggcccaggtgt

SEQ ID NO: 292177 - DNA, 20 bp, synthetic construct
  source 1..20: mol_type = other DNA
tccaggttggggcccaggtg

SEQ ID NO: 292178 - DNA, 20 bp, synthetic construct
  source 1..20: mol_type = other DNA
ctccaggttggggcccaggt

SEQ ID NO: 292179 - DNA, 20 bp, synthetic construct
  source 1..20: mol_type = other DNA
tctccaggttggggcccagg

SEQ ID NO: 292180 - DNA, 20 bp, synthetic construct
  source 1..20: mol_type = other DNA
ctctccaggttggggcccag

SEQ ID NO: 292181 - DNA, 20 bp, synthetic construct
  source 1..20: mol_type = other DNA
cctctccaggttggggccca

SEQ ID NO: 292182 - DNA, 20 bp, synthetic construct
  source 1..20: mol_type = other DNA
gcctctccaggttggggccc

SEQ ID NO: 292183 - DNA, 20 bp, synthetic construct
  source 1..20: mol_type = other DNA
agcctctccaggttggggcc

SEQ ID NO: 292184 - DNA, 20 bp, synthetic construct
  source 1..20: mol_type = other DNA
cagcctctccaggttggggc

SEQ ID NO: 292185 - DNA, 20 bp, synthetic construct
  source 1..20: mol_type = other DNA
tcagcctctccaggttgggg

SEQ ID NO: 292186 - DNA, 20 bp, synthetic construct
  source 1..20: mol_type = other DNA
gtcagcctctccaggttggg

SEQ ID NO: 292187 - DNA, 20 bp, synthetic construct
  source 1..20: mol_type = other DNA
ggtcagcctctccaggttgg

SEQ ID NO: 292188 - DNA, 20 bp, synthetic construct
  source 1..20: mol_type = other DNA
tggtcagcctctccaggttg

SEQ ID NO: 292189 - DNA, 20 bp, synthetic construct
  source 1..20: mol_type = other DNA
ttggtcagcctctccaggtt

SEQ ID NO: 292190 - DNA, 20 bp, synthetic construct
  source 1..20: mol_type = other DNA
attggtcagcctctccaggt

SEQ ID NO: 292191 - DNA, 20 bp, synthetic construct
  source 1..20: mol_type = other DNA
cattggtcagcctctccagg

SEQ ID NO: 292192 - DNA, 20 bp, synthetic construct
  source 1..20: mol_type = other DNA
ccattggtcagcctctccag

SEQ ID NO: 292193 - DNA, 20 bp, synthetic construct
  source 1..20: mol_type = other DNA
cccattggtcagcctctcca

SEQ ID NO: 292194 - DNA, 20 bp, synthetic construct
  source 1..20: mol_type = other DNA
acccattggtcagcctctcc

SEQ ID NO: 292195 - DNA, 20 bp, synthetic construct
  source 1..20: mol_type = other DNA
gacccattggtcagcctctc

SEQ ID NO: 292196 - DNA, 20 bp, synthetic construct
  source 1..20: mol_type = other DNA
agacccattggtcagcctct

SEQ ID NO: 292197 - DNA, 20 bp, synthetic construct
  source 1..20: mol_type = other DNA
gagacccattggtcagcctc

SEQ ID NO: 292198 - DNA, 20 bp, synthetic construct
  source 1..20: mol_type = other DNA
tgagacccattggtcagcct

SEQ ID NO: 292199 - DNA, 20 bp, synthetic construct
  source 1..20: mol_type = other DNA
ctgagacccattggtcagcc

SEQ ID NO: 292200 - DNA, 20 bp, synthetic construct
  source 1..20: mol_type = other DNA
cctgagacccattggtcagc

SEQ ID NO: 292201 - DNA, 20 bp, synthetic construct
  source 1..20: mol_type = other DNA
ccctgagacccattggtcag

SEQ ID NO: 292202 - DNA, 20 bp, synthetic construct
  source 1..20: mol_type = other DNA
cccctgagacccattggtca

SEQ ID NO: 292203 - DNA, 20 bp, synthetic construct
  source 1..20: mol_type = other DNA
gcccctgagacccattggtc

SEQ ID NO: 292204 - DNA, 20 bp, synthetic construct
  source 1..20: mol_type = other DNA
tgcccctgagacccattggt

SEQ ID NO: 292205 - DNA, 20 bp, synthetic construct
  source 1..20: mol_type = other DNA
ctgcccctgagacccattgg

SEQ ID NO: 292206 - DNA, 20 bp, synthetic construct
  source 1..20: mol_type = other DNA
gctgcccctgagacccattg

SEQ ID NO: 292207 - DNA, 20 bp, synthetic construct
  source 1..20: mol_type = other DNA
agctgcccctgagacccatt

SEQ ID NO: 292208 - DNA, 20 bp, synthetic construct
  source 1..20: mol_type = other DNA
gagctgcccctgagacccat

SEQ ID NO: 292209 - DNA, 20 bp, synthetic construct
  source 1..20: mol_type = other DNA
cgagctgcccctgagaccca

SEQ ID NO: 292210 - DNA, 20 bp, synthetic construct
  source 1..20: mol_type = other DNA
ccgagctgcccctgagaccc

SEQ ID NO: 292211 - DNA, 20 bp, synthetic construct
  source 1..20: mol_type = other DNA
accgagctgcccctgagacc

SEQ ID NO: 292212 - DNA, 20 bp, synthetic construct
  source 1..20: mol_type = other DNA
aaccgagctgcccctgagac

SEQ ID NO: 292213 - DNA, 20 bp, synthetic construct
  source 1..20: mol_type = other DNA
caaccgagctgcccctgaga

SEQ ID NO: 292214 - DNA, 20 bp, synthetic construct
  source 1..20: mol_type = other DNA
gcaaccgagctgcccctgag

SEQ ID NO: 292215 - DNA, 20 bp, synthetic construct
  source 1..20: mol_type = other DNA
agcaaccgagctgcccctga

SEQ ID NO: 292216 - DNA, 20 bp, synthetic construct
  source 1..20: mol_type = other DNA
cagcaaccgagctgcccctg

SEQ ID NO: 292217 - DNA, 20 bp, synthetic construct
  source 1..20: mol_type = other DNA
ccagcaaccgagctgcccct

SEQ ID NO: 292218 - DNA, 20 bp, synthetic construct
  source 1..20: mol_type = other DNA
tccagcaaccgagctgcccc

SEQ ID NO: 292219 - DNA, 20 bp, synthetic construct
  source 1..20: mol_type = other DNA
ctccagcaaccgagctgccc

SEQ ID NO: 292220 - DNA, 20 bp, synthetic construct
  source 1..20: mol_type = other DNA
actccagcaaccgagctgcc

SEQ ID NO: 292221 - DNA, 20 bp, synthetic construct
  source 1..20: mol_type = other DNA
aactccagcaaccgagctgc

SEQ ID NO: 292222 - DNA, 20 bp, synthetic construct
  source 1..20: mol_type = other DNA
aaactccagcaaccgagctg

SEQ ID NO: 292223 - DNA, 20 bp, synthetic construct
  source 1..20: mol_type = other DNA
aaaactccagcaaccgagct

SEQ ID NO: 292224 - DNA, 20 bp, synthetic construct
  source 1..20: mol_type = other DNA
aaaaactccagcaaccgagc

SEQ ID NO: 292225 - DNA, 20 bp, synthetic construct
  source 1..20: mol_type = other DNA
caaaaactccagcaaccgag

SEQ ID NO: 292226 - DNA, 20 bp, synthetic construct
  source 1..20: mol_type = other DNA
acaaaaactccagcaaccga

SEQ ID NO: 292227 - DNA, 20 bp, synthetic construct
  source 1..20: mol_type = other DNA
aacaaaaactccagcaaccg

SEQ ID NO: 292228 - DNA, 20 bp, synthetic construct
  source 1..20: mol_type = other DNA
aaacaaaaactccagcaacc

SEQ ID NO: 292229 - DNA, 20 bp, synthetic construct
  source 1..20: mol_type = other DNA
aaaacaaaaactccagcaac

SEQ ID NO: 292230 - DNA, 20 bp, synthetic construct
  source 1..20: mol_type = other DNA
aaaaacaaaaactccagcaa

SEQ ID NO: 292231 - DNA, 20 bp, synthetic construct
  source 1..20: mol_type = other DNA
taaaaacaaaaactccagca

SEQ ID NO: 292232 - DNA, 20 bp, synthetic construct
  source 1..20: mol_type = other DNA
ataaaaacaaaaactccagc

SEQ ID NO: 292233 - DNA, 20 bp, synthetic construct
  source 1..20: mol_type = other DNA
aataaaaacaaaaactccag

SEQ ID NO: 292234 - DNA, 20 bp, synthetic construct
  source 1..20: mol_type = other DNA
aaataaaaacaaaaactcca

SEQ ID NO: 292235 - DNA, 20 bp, synthetic construct
  source 1..20: mol_type = other DNA
taaataaaaacaaaaactcc

SEQ ID NO: 292236 - DNA, 20 bp, synthetic construct
  source 1..20: mol_type = other DNA
ataaataaaaacaaaaactc

SEQ ID NO: 292237 - DNA, 20 bp, synthetic construct
  source 1..20: mol_type = other DNA
aataaataaaaacaaaaact

SEQ ID NO: 292238 - DNA, 20 bp, synthetic construct
  source 1..20: mol_type = other DNA
aaataaataaaaacaaaaac

SEQ ID NO: 292239 - DNA, 20 bp, synthetic construct
  source 1..20: mol_type = other DNA
aaaataaataaaaacaaaaa

SEQ ID NO: 292240 - DNA, 20 bp, synthetic construct
  source 1..20: mol_type = other DNA
aaaaataaataaaaacaaaa

SEQ ID NO: 292241 - DNA, 20 bp, synthetic construct
  source 1..20: mol_type = other DNA
taaaaataaataaaaacaaa

SEQ ID NO: 292242 - DNA, 20 bp, synthetic construct
  source 1..20: mol_type = other DNA
ataaaaataaataaaaacaa

SEQ ID NO: 292243 - DNA, 20 bp, synthetic construct
  source 1..20: mol_type = other DNA
cataaaaataaataaaaaca

SEQ ID NO: 292244 - DNA, 20 bp, synthetic construct
  source 1..20: mol_type = other DNA
acataaaaataaataaaaac

SEQ ID NO: 292245 - DNA, 20 bp, synthetic construct
  source 1..20: mol_type = other DNA
tacataaaaataaataaaaa

SEQ ID NO: 292246 - DNA, 20 bp, synthetic construct
  source 1..20: mol_type = other DNA
atacataaaaataaataaaa

SEQ ID NO: 292247 - DNA, 20 bp, synthetic construct
  source 1..20: mol_type = other DNA
aatacataaaaataaataaa

SEQ ID NO: 292248 - DNA, 20 bp, synthetic construct
  source 1..20: mol_type = other DNA
aaatacataaaaataaataa

SEQ ID NO: 292249 - DNA, 20 bp, synthetic construct
  source 1..20: mol_type = other DNA
taaatacataaaaataaata

SEQ ID NO: 292250 - DNA, 20 bp, synthetic construct
  source 1..20: mol_type = other DNA
ttaaatacataaaaataaat

SEQ ID NO: 292251 - DNA, 20 bp, synthetic construct
  source 1..20: mol_type = other DNA
cttaaatacataaaaataaa

SEQ ID NO: 292252 - DNA, 20 bp, synthetic construct
  source 1..20: mol_type = other DNA
ccttaaatacataaaaataa

SEQ ID NO: 292253 - DNA, 20 bp, synthetic construct
  source 1..20: mol_type = other DNA
gccttaaatacataaaaata

SEQ ID NO: 292254 - DNA, 20 bp, synthetic construct
  source 1..20: mol_type = other DNA
tgccttaaatacataaaaat

SEQ ID NO: 292255 - DNA, 20 bp, synthetic construct
  source 1..20: mol_type = other DNA
ctgccttaaatacataaaaa

SEQ ID NO: 292256 - DNA, 20 bp, synthetic construct
  source 1..20: mol_type = other DNA
cctgccttaaatacataaaa

SEQ ID NO: 292257 - DNA, 20 bp, synthetic construct
  source 1..20: mol_type = other DNA
ccctgccttaaatacataaa

SEQ ID NO: 292258 - DNA, 20 bp, synthetic construct
  source 1..20: mol_type = other DNA
accctgccttaaatacataa

SEQ ID NO: 292259 - DNA, 20 bp, synthetic construct
  source 1..20: mol_type = other DNA
gaccctgccttaaatacata

SEQ ID NO: 292260 - DNA, 20 bp, synthetic construct
  source 1..20: mol_type = other DNA
agaccctgccttaaatacat

SEQ ID NO: 292261 - DNA, 20 bp, synthetic construct
  source 1..20: mol_type = other DNA
gagaccctgccttaaataca

SEQ ID NO: 292262 - DNA, 20 bp, synthetic construct
  source 1..20: mol_type = other DNA
agagaccctgccttaaatac

SEQ ID NO: 292263 - DNA, 20 bp, synthetic construct
  source 1..20: mol_type = other DNA
cagagaccctgccttaaata

SEQ ID NO: 292264 - DNA, 20 bp, synthetic construct
  source 1..20: mol_type = other DNA
acagagaccctgccttaaat

SEQ ID NO: 292265 - DNA, 20 bp, synthetic construct
  source 1..20: mol_type = other DNA
tacagagaccctgccttaaa

SEQ ID NO: 292266 - DNA, 20 bp, synthetic construct
  source 1..20: mol_type = other DNA
atacagagaccctgccttaa

SEQ ID NO: 292267 - DNA, 20 bp, synthetic construct
  source 1..20: mol_type = other DNA
aatacagagaccctgcctta

SEQ ID NO: 292268 - DNA, 20 bp, synthetic construct
  source 1..20: mol_type = other DNA
taatacagagaccctgcctt

SEQ ID NO: 292269 - DNA, 20 bp, synthetic construct
  source 1..20: mol_type = other DNA
ctaatacagagaccctgcct

SEQ ID NO: 292270 - DNA, 20 bp, synthetic construct
  source 1..20: mol_type = other DNA
actaatacagagaccctgcc

SEQ ID NO: 292271 - DNA, 20 bp, synthetic construct
  source 1..20: mol_type = other DNA
gactaatacagagaccctgc

SEQ ID NO: 292272 - DNA, 20 bp, synthetic construct
  source 1..20: mol_type = other DNA
ggactaatacagagaccctg

SEQ ID NO: 292273 - DNA, 20 bp, synthetic construct
  source 1..20: mol_type = other DNA
tggactaatacagagaccct

SEQ ID NO: 292274 - DNA, 20 bp, synthetic construct
  source 1..20: mol_type = other DNA
atggactaatacagagaccc

SEQ ID NO: 292275 - DNA, 20 bp, synthetic construct
  source 1..20: mol_type = other DNA
aatggactaatacagagacc

SEQ ID NO: 292276 - DNA, 20 bp, synthetic construct
  source 1..20: mol_type = other DNA
gaatggactaatacagagac

SEQ ID NO: 292277 - DNA, 20 bp, synthetic construct
  source 1..20: mol_type = other DNA
agaatggactaatacagaga

SEQ ID NO: 292278 - DNA, 20 bp, synthetic construct
  source 1..20: mol_type = other DNA
gagaatggactaatacagag

SEQ ID NO: 292279 - DNA, 20 bp, synthetic construct
  source 1..20: mol_type = other DNA
tgagaatggactaatacaga

SEQ ID NO: 292280 - DNA, 20 bp, synthetic construct
  source 1..20: mol_type = other DNA
gtgagaatggactaatacag

SEQ ID NO: 292281 - DNA, 20 bp, synthetic construct
  source 1..20: mol_type = other DNA
tgtgagaatggactaataca

SEQ ID NO: 292282 - DNA, 20 bp, synthetic construct
  source 1..20: mol_type = other DNA
gtgtgagaatggactaatac

SEQ ID NO: 292283 - DNA, 20 bp, synthetic construct
  source 1..20: mol_type = other DNA
agtgtgagaatggactaata

SEQ ID NO: 292284 - DNA, 20 bp, synthetic construct
  source 1..20: mol_type = other DNA
cagtgtgagaatggactaat

SEQ ID NO: 292285 - DNA, 20 bp, synthetic construct
  source 1..20: mol_type = other DNA
gcagtgtgagaatggactaa

SEQ ID NO: 292286 - DNA, 20 bp, synthetic construct
  source 1..20: mol_type = other DNA
agcagtgtgagaatggacta

SEQ ID NO: 292287 - DNA, 20 bp, synthetic construct
  source 1..20: mol_type = other DNA
tagcagtgtgagaatggact

SEQ ID NO: 292288 - DNA, 20 bp, synthetic construct
  source 1..20: mol_type = other DNA
ttagcagtgtgagaatggac

SEQ ID NO: 292289 - DNA, 20 bp, synthetic construct
  source 1..20: mol_type = other DNA
attagcagtgtgagaatgga

SEQ ID NO: 292290 - DNA, 20 bp, synthetic construct
  source 1..20: mol_type = other DNA
tattagcagtgtgagaatgg

SEQ ID NO: 292291 - DNA, 20 bp, synthetic construct
  source 1..20: mol_type = other DNA
ttattagcagtgtgagaatg

SEQ ID NO: 292292 - DNA, 20 bp, synthetic construct
  source 1..20: mol_type = other DNA
tttattagcagtgtgagaat

SEQ ID NO: 292293 - DNA, 20 bp, synthetic construct
  source 1..20: mol_type = other DNA
ctttattagcagtgtgagaa

SEQ ID NO: 292294 - DNA, 20 bp, synthetic construct
  source 1..20: mol_type = other DNA
tctttattagcagtgtgaga

SEQ ID NO: 292295 - DNA, 20 bp, synthetic construct
  source 1..20: mol_type = other DNA
gtctttattagcagtgtgag

SEQ ID NO: 292296 - DNA, 20 bp, synthetic construct
  source 1..20: mol_type = other DNA
tgtctttattagcagtgtga

SEQ ID NO: 292297 - DNA, 20 bp, synthetic construct
  source 1..20: mol_type = other DNA
atgtctttattagcagtgtg

SEQ ID NO: 292298 - DNA, 20 bp, synthetic construct
  source 1..20: mol_type = other DNA
tatgtctttattagcagtgt

SEQ ID NO: 292299 - DNA, 20 bp, synthetic construct
  source 1..20: mol_type = other DNA
gtatgtctttattagcagtg

SEQ ID NO: 292300 - DNA, 20 bp, synthetic construct
  source 1..20: mol_type = other DNA
ggtatgtctttattagcagt

SEQ ID NO: 292301 - DNA, 20 bp, synthetic construct
  source 1..20: mol_type = other DNA
gggtatgtctttattagcag

SEQ ID NO: 292302 - DNA, 20 bp, synthetic construct
  source 1..20: mol_type = other DNA
tgggtatgtctttattagca

SEQ ID NO: 292303 - DNA, 20 bp, synthetic construct
  source 1..20: mol_type = other DNA
ttgggtatgtctttattagc

SEQ ID NO: 292304 - DNA, 20 bp, synthetic construct
  source 1..20: mol_type = other DNA
cttgggtatgtctttattag

SEQ ID NO: 292305 - DNA, 20 bp, synthetic construct
  source 1..20: mol_type = other DNA
tcttgggtatgtctttatta

SEQ ID NO: 292306 - DNA, 20 bp, synthetic construct
  source 1..20: mol_type = other DNA
gtcttgggtatgtctttatt

SEQ ID NO: 292307 - DNA, 20 bp, synthetic construct
  source 1..20: mol_type = other DNA
agtcttgggtatgtctttat

SEQ ID NO: 292308 - DNA, 20 bp, synthetic construct
  source 1..20: mol_type = other DNA
cagtcttgggtatgtcttta

SEQ ID NO: 292309 - DNA, 20 bp, synthetic construct
  source 1..20: mol_type = other DNA
ccagtcttgggtatgtcttt

SEQ ID NO: 292310 - DNA, 20 bp, synthetic construct
  source 1..20: mol_type = other DNA
cccagtcttgggtatgtctt

SEQ ID NO: 292311 - DNA, 20 bp, synthetic construct
  source 1..20: mol_type = other DNA
acccagtcttgggtatgtct

SEQ ID NO: 292312 - DNA, 20 bp, synthetic construct
  source 1..20: mol_type = other DNA
tacccagtcttgggtatgtc

SEQ ID NO: 292313 - DNA, 20 bp, synthetic construct
  source 1..20: mol_type = other DNA
ttacccagtcttgggtatgt

SEQ ID NO: 292314 - DNA, 20 bp, synthetic construct
  source 1..20: mol_type = other DNA
attacccagtcttgggtatg

SEQ ID NO: 292315 - DNA, 20 bp, synthetic construct
  source 1..20: mol_type = other DNA
aattacccagtcttgggtat

SEQ ID NO: 292316 - DNA, 20 bp, synthetic construct
  source 1..20: mol_type = other DNA
aaattacccagtcttgggta

SEQ ID NO: 292317 - DNA, 20 bp, synthetic construct
  source 1..20: mol_type = other DNA
taaattacccagtcttgggt

SEQ ID NO: 292318 - DNA, 20 bp, synthetic construct
  source 1..20: mol_type = other DNA
ataaattacccagtcttggg

SEQ ID NO: 292319 - DNA, 20 bp, synthetic construct
  source 1..20: mol_type = other DNA
tataaattacccagtcttgg

SEQ ID NO: 292320 - DNA, 20 bp, synthetic construct
  source 1..20: mol_type = other DNA
ttataaattacccagtcttg

SEQ ID NO: 292321 - DNA, 20 bp, synthetic construct
  source 1..20: mol_type = other DNA
tttataaattacccagtctt

SEQ ID NO: 292322 - DNA, 20 bp, synthetic construct
  source 1..20: mol_type = other DNA
ctttataaattacccagtct

SEQ ID NO: 292323 - DNA, 20 bp, synthetic construct
  source 1..20: mol_type = other DNA
cctttataaattacccagtc

SEQ ID NO: 292324 - DNA, 20 bp, synthetic construct
  source 1..20: mol_type = other DNA
tcctttataaattacccagt

SEQ ID NO: 292325 - DNA, 20 bp, synthetic construct
  source 1..20: mol_type = other DNA
ttcctttataaattacccag

SEQ ID NO: 292326 - DNA, 20 bp, synthetic construct
  source 1..20: mol_type = other DNA
tttcctttataaattaccca

SEQ ID NO: 292327 - DNA, 20 bp, synthetic construct
  source 1..20: mol_type = other DNA
ctttcctttataaattaccc

SEQ ID NO: 292328 - DNA, 20 bp, synthetic construct
  source 1..20: mol_type = other DNA
tctttcctttataaattacc

SEQ ID NO: 292329 - DNA, 20 bp, synthetic construct
  source 1..20: mol_type = other DNA
ctctttcctttataaattac

SEQ ID NO: 292330 - DNA, 20 bp, synthetic construct
  source 1..20: mol_type = other DNA
cctctttcctttataaatta

SEQ ID NO: 292331 - DNA, 20 bp, synthetic construct
  source 1..20: mol_type = other DNA
acctctttcctttataaatt

SEQ ID NO: 292332 - DNA, 20 bp, synthetic construct
  source 1..20: mol_type = other DNA
aacctctttcctttataaat

SEQ ID NO: 292333 - DNA, 20 bp, synthetic construct
  source 1..20: mol_type = other DNA
aaacctctttcctttataaa

SEQ ID NO: 292334 - DNA, 20 bp, synthetic construct
  source 1..20: mol_type = other DNA
taaacctctttcctttataa

SEQ ID NO: 292335 - DNA, 20 bp, synthetic construct
  source 1..20: mol_type = other DNA
ttaaacctctttcctttata

SEQ ID NO: 292336 - DNA, 20 bp, synthetic construct
  source 1..20: mol_type = other DNA
attaaacctctttcctttat

SEQ ID NO: 292337 - DNA, 20 bp, synthetic construct
  source 1..20: mol_type = other DNA
cattaaacctctttccttta

SEQ ID NO: 292338 - DNA, 20 bp, synthetic construct
  source 1..20: mol_type = other DNA
ccattaaacctctttccttt

SEQ ID NO: 292339 - DNA, 20 bp, synthetic construct
  source 1..20: mol_type = other DNA
tccattaaacctctttcctt

SEQ ID NO: 292340 - DNA, 20 bp, synthetic construct
  source 1..20: mol_type = other DNA
gtccattaaacctctttcct

SEQ ID NO: 292341 - DNA, 20 bp, synthetic construct
  source 1..20: mol_type = other DNA
agtccattaaacctctttcc

SEQ ID NO: 292342 - DNA, 20 bp, synthetic construct
  source 1..20: mol_type = other DNA
gagtccattaaacctctttc

SEQ ID NO: 292343 - DNA, 20 bp, synthetic construct
  source 1..20: mol_type = other DNA
tgagtccattaaacctcttt

SEQ ID NO: 292344 - DNA, 20 bp, synthetic construct
  source 1..20: mol_type = other DNA
gtgagtccattaaacctctt

SEQ ID NO: 292345 - DNA, 20 bp, synthetic construct
  source 1..20: mol_type = other DNA
tgtgagtccattaaacctct

SEQ ID NO: 292346 - DNA, 20 bp, synthetic construct
  source 1..20: mol_type = other DNA
ctgtgagtccattaaacctc

SEQ ID NO: 292347 - DNA, 20 bp, synthetic construct
  source 1..20: mol_type = other DNA
actgtgagtccattaaacct

SEQ ID NO: 292348 - DNA, 20 bp, synthetic construct
  source 1..20: mol_type = other DNA
aactgtgagtccattaaacc

SEQ ID NO: 292349 - DNA, 20 bp, synthetic construct
  source 1..20: mol_type = other DNA
gaactgtgagtccattaaac

SEQ ID NO: 292350 - DNA, 20 bp, synthetic construct
  source 1..20: mol_type = other DNA
ggaactgtgagtccattaaa

SEQ ID NO: 292351 - DNA, 20 bp, synthetic construct
  source 1..20: mol_type = other DNA
tggaactgtgagtccattaa

SEQ ID NO: 292352 - DNA, 20 bp, synthetic construct
  source 1..20: mol_type = other DNA
gtggaactgtgagtccatta

SEQ ID NO: 292353 - DNA, 20 bp, synthetic construct
  source 1..20: mol_type = other DNA
tgtggaactgtgagtccatt

SEQ ID NO: 292354 - DNA, 20 bp, synthetic construct
  source 1..20: mol_type = other DNA
atgtggaactgtgagtccat

SEQ ID NO: 292355 - DNA, 20 bp, synthetic construct
  source 1..20: mol_type = other DNA
catgtggaactgtgagtcca

SEQ ID NO: 292356 - DNA, 20 bp, synthetic construct
  source 1..20: mol_type = other DNA
ccatgtggaactgtgagtcc

SEQ ID NO: 292357 - DNA, 20 bp, synthetic construct
  source 1..20: mol_type = other DNA
gccatgtggaactgtgagtc

SEQ ID NO: 292358 - DNA, 20 bp, synthetic construct
  source 1..20: mol_type = other DNA
agccatgtggaactgtgagt

SEQ ID NO: 292359 - DNA, 20 bp, synthetic construct
  source 1..20: mol_type = other DNA
cagccatgtggaactgtgag

SEQ ID NO: 292360 - DNA, 20 bp, synthetic construct
  source 1..20: mol_type = other DNA
ccagccatgtggaactgtga

SEQ ID NO: 292361 - DNA, 20 bp, synthetic construct
  source 1..20: mol_type = other DNA
cccagccatgtggaactgtg

SEQ ID NO: 292362 - DNA, 20 bp, synthetic construct
  source 1..20: mol_type = other DNA
ccccagccatgtggaactgt

SEQ ID NO: 292363 - DNA, 20 bp, synthetic construct
  source 1..20: mol_type = other DNA
tccccagccatgtggaactg

SEQ ID NO: 292364 - DNA, 20 bp, synthetic construct
  source 1..20: mol_type = other DNA
ctccccagccatgtggaact

SEQ ID NO: 292365 - DNA, 20 bp, synthetic construct
  source 1..20: mol_type = other DNA
cctccccagccatgtggaac

SEQ ID NO: 292366 - DNA, 20 bp, synthetic construct
  source 1..20: mol_type = other DNA
gcctccccagccatgtggaa

SEQ ID NO: 292367 - DNA, 20 bp, synthetic construct
  source 1..20: mol_type = other DNA
ggcctccccagccatgtgga

SEQ ID NO: 292368 - DNA, 20 bp, synthetic construct
  source 1..20: mol_type = other DNA
aggcctccccagccatgtgg

SEQ ID NO: 292369 - DNA, 20 bp, synthetic construct
  source 1..20: mol_type = other DNA
gaggcctccccagccatgtg

SEQ ID NO: 292370 - DNA, 20 bp, synthetic construct
  source 1..20: mol_type = other DNA
tgaggcctccccagccatgt

SEQ ID NO: 292371 - DNA, 20 bp, synthetic construct
  source 1..20: mol_type = other DNA
ttgaggcctccccagccatg

SEQ ID NO: 292372 - DNA, 20 bp, synthetic construct
  source 1..20: mol_type = other DNA
tttgaggcctccccagccat

SEQ ID NO: 292373 - DNA, 20 bp, synthetic construct
  source 1..20: mol_type = other DNA
ttttgaggcctccccagcca

SEQ ID NO: 292374 - DNA, 20 bp, synthetic construct
  source 1..20: mol_type = other DNA
attttgaggcctccccagcc

SEQ ID NO: 292375 - DNA, 20 bp, synthetic construct
  source 1..20: mol_type = other DNA
gattttgaggcctccccagc

SEQ ID NO: 292376 - DNA, 20 bp, synthetic construct
  source 1..20: mol_type = other DNA
tgattttgaggcctccccag

SEQ ID NO: 292377 - DNA, 20 bp, synthetic construct
  source 1..20: mol_type = other DNA
atgattttgaggcctcccca

SEQ ID NO: 292378 - DNA, 20 bp, synthetic construct
  source 1..20: mol_type = other DNA
catgattttgaggcctcccc

SEQ ID NO: 292379 - DNA, 20 bp, synthetic construct
  source 1..20: mol_type = other DNA
ccatgattttgaggcctccc

SEQ ID NO: 292380 - DNA, 20 bp, synthetic construct
  source 1..20: mol_type = other DNA
gccatgattttgaggcctcc

SEQ ID NO: 292381 - DNA, 20 bp, synthetic construct
  source 1..20: mol_type = other DNA
cgccatgattttgaggcctc

SEQ ID NO: 292382 - DNA, 20 bp, synthetic construct
  source 1..20: mol_type = other DNA
ccgccatgattttgaggcct

SEQ ID NO: 292383 - DNA, 20 bp, synthetic construct
  source 1..20: mol_type = other DNA
tccgccatgattttgaggcc

SEQ ID NO: 292384 - DNA, 20 bp, synthetic construct
  source 1..20: mol_type = other DNA
ttccgccatgattttgaggc

SEQ ID NO: 292385 - DNA, 20 bp, synthetic construct
  source 1..20: mol_type = other DNA
cttccgccatgattttgagg

SEQ ID NO: 292386 - DNA, 20 bp, synthetic construct
  source 1..20: mol_type = other DNA
ccttccgccatgattttgag

SEQ ID NO: 292387 - DNA, 20 bp, synthetic construct
  source 1..20: mol_type = other DNA
gccttccgccatgattttga

SEQ ID NO: 292388 - DNA, 20 bp, synthetic construct
  source 1..20: mol_type = other DNA
tgccttccgccatgattttg

SEQ ID NO: 292389 - DNA, 20 bp, synthetic construct
  source 1..20: mol_type = other DNA
ttgccttccgccatgatttt

SEQ ID NO: 292390 - DNA, 20 bp, synthetic construct
  source 1..20: mol_type = other DNA
tttgccttccgccatgattt

SEQ ID NO: 292391 - DNA, 20 bp, synthetic construct
  source 1..20: mol_type = other DNA
ctttgccttccgccatgatt

SEQ ID NO: 292392 - DNA, 20 bp, synthetic construct
  source 1..20: mol_type = other DNA
cctttgccttccgccatgat

SEQ ID NO: 292393 - DNA, 20 bp, synthetic construct
  source 1..20: mol_type = other DNA
tcctttgccttccgccatga

SEQ ID NO: 292394 - DNA, 20 bp, synthetic construct
  source 1..20: mol_type = other DNA
ctcctttgccttccgccatg

SEQ ID NO: 292395 - DNA, 20 bp, synthetic construct
  source 1..20: mol_type = other DNA
tctcctttgccttccgccat

SEQ ID NO: 292396 - DNA, 20 bp, synthetic construct
  source 1..20: mol_type = other DNA
ttctcctttgccttccgcca

SEQ ID NO: 292397 - DNA, 20 bp, synthetic construct
  source 1..20: mol_type = other DNA
cttctcctttgccttccgcc

SEQ ID NO: 292398 - DNA, 20 bp, synthetic construct
  source 1..20: mol_type = other DNA
gcttctcctttgccttccgc

SEQ ID NO: 292399 - DNA, 20 bp, synthetic construct
  source 1..20: mol_type = other DNA
tgcttctcctttgccttccg

SEQ ID NO: 292400 - DNA, 20 bp, synthetic construct
  source 1..20: mol_type = other DNA
ttgcttctcctttgccttcc

SEQ ID NO: 292401 - DNA, 20 bp, synthetic construct
  source 1..20: mol_type = other DNA
tttgcttctcctttgccttc

SEQ ID NO: 292402 - DNA, 20 bp, synthetic construct
  source 1..20: mol_type = other DNA
ctttgcttctcctttgcctt

SEQ ID NO: 292403 - DNA, 20 bp, synthetic construct
  source 1..20: mol_type = other DNA
cctttgcttctcctttgcct

SEQ ID NO: 292404 - DNA, 20 bp, synthetic construct
  source 1..20: mol_type = other DNA
gcctttgcttctcctttgcc

SEQ ID NO: 292405 - DNA, 20 bp, synthetic construct
  source 1..20: mol_type = other DNA
tgcctttgcttctcctttgc

SEQ ID NO: 292406 - DNA, 20 bp, synthetic construct
  source 1..20: mol_type = other DNA
atgcctttgcttctcctttg

SEQ ID NO: 292407 - DNA, 20 bp, synthetic construct
  source 1..20: mol_type = other DNA
aatgcctttgcttctccttt

SEQ ID NO: 292408 - DNA, 20 bp, synthetic construct
  source 1..20: mol_type = other DNA
aaatgcctttgcttctcctt

SEQ ID NO: 292409 - DNA, 20 bp, synthetic construct
  source 1..20: mol_type = other DNA
gaaatgcctttgcttctcct

SEQ ID NO: 292410 - DNA, 20 bp, synthetic construct
  source 1..20: mol_type = other DNA
agaaatgcctttgcttctcc

SEQ ID NO: 292411 - DNA, 20 bp, synthetic construct
  source 1..20: mol_type = other DNA
aagaaatgcctttgcttctc

SEQ ID NO: 292412 - DNA, 20 bp, synthetic construct
  source 1..20: mol_type = other DNA
taagaaatgcctttgcttct

SEQ ID NO: 292413 - DNA, 20 bp, synthetic construct
  source 1..20: mol_type = other DNA
gtaagaaatgcctttgcttc

SEQ ID NO: 292414 - DNA, 20 bp, synthetic construct
  source 1..20: mol_type = other DNA
tgtaagaaatgcctttgctt

SEQ ID NO: 292415 - DNA, 20 bp, synthetic construct
  source 1..20: mol_type = other DNA
atgtaagaaatgcctttgct

SEQ ID NO: 292416 - DNA, 20 bp, synthetic construct
  source 1..20: mol_type = other DNA
catgtaagaaatgcctttgc

SEQ ID NO: 292417 - DNA, 20 bp, synthetic construct
  source 1..20: mol_type = other DNA
ccatgtaagaaatgcctttg

SEQ ID NO: 292418 - DNA, 20 bp, synthetic construct
  source 1..20: mol_type = other DNA
gccatgtaagaaatgccttt

SEQ ID NO: 292419 - DNA, 20 bp, synthetic construct
  source 1..20: mol_type = other DNA
cgccatgtaagaaatgcctt

SEQ ID NO: 292420 - DNA, 20 bp, synthetic construct
  source 1..20: mol_type = other DNA
tcgccatgtaagaaatgcct

SEQ ID NO: 292421 - DNA, 20 bp, synthetic construct
  source 1..20: mol_type = other DNA
gtcgccatgtaagaaatgcc

SEQ ID NO: 292422 - DNA, 20 bp, synthetic construct
  source 1..20: mol_type = other DNA
tgtcgccatgtaagaaatgc

SEQ ID NO: 292423 - DNA, 20 bp, synthetic construct
  source 1..20: mol_type = other DNA
ctgtcgccatgtaagaaatg

SEQ ID NO: 292424 - DNA, 20 bp, synthetic construct
  source 1..20: mol_type = other DNA
cctgtcgccatgtaagaaat

SEQ ID NO: 292425 - DNA, 20 bp, synthetic construct
  source 1..20: mol_type = other DNA
gcctgtcgccatgtaagaaa

SEQ ID NO: 292426 - DNA, 20 bp, synthetic construct
  source 1..20: mol_type = other DNA
tgcctgtcgccatgtaagaa

SEQ ID NO: 292427 - DNA, 20 bp, synthetic construct
  source 1..20: mol_type = other DNA
ttgcctgtcgccatgtaaga

SEQ ID NO: 292428 - DNA, 20 bp, synthetic construct
  source 1..20: mol_type = other DNA
cttgcctgtcgccatgtaag

SEQ ID NO: 292429 - DNA, 20 bp, synthetic construct
  source 1..20: mol_type = other DNA
tcttgcctgtcgccatgtaa

SEQ ID NO: 292430 - DNA, 20 bp, synthetic construct
  source 1..20: mol_type = other DNA
ctcttgcctgtcgccatgta

SEQ ID NO: 292431 - DNA, 20 bp, synthetic construct
  source 1..20: mol_type = other DNA
tctcttgcctgtcgccatgt

SEQ ID NO: 292432 - DNA, 20 bp, synthetic construct
  source 1..20: mol_type = other DNA
ctctcttgcctgtcgccatg

SEQ ID NO: 292433 - DNA, 20 bp, synthetic construct
  source 1..20: mol_type = other DNA
gctctcttgcctgtcgccat

SEQ ID NO: 292434 - DNA, 20 bp, synthetic construct
  source 1..20: mol_type = other DNA
cgctctcttgcctgtcgcca

SEQ ID NO: 292435 - DNA, 20 bp, synthetic construct
  source 1..20: mol_type = other DNA
acgctctcttgcctgtcgcc

SEQ ID NO: 292436 - DNA, 20 bp, synthetic construct
  source 1..20: mol_type = other DNA
cacgctctcttgcctgtcgc

SEQ ID NO: 292437 - DNA, 20 bp, synthetic construct
  source 1..20: mol_type = other DNA
acacgctctcttgcctgtcg

SEQ ID NO: 292438 - DNA, 20 bp, synthetic construct
  source 1..20: mol_type = other DNA
cacacgctctcttgcctgtc

SEQ ID NO: 292439 - DNA, 20 bp, synthetic construct
  source 1..20: mol_type = other DNA
gcacacgctctcttgcctgt

SEQ ID NO: 292440 - DNA, 20 bp, synthetic construct
  source 1..20: mol_type = other DNA
tgcacacgctctcttgcctg

SEQ ID NO: 292441 - DNA, 20 bp, synthetic construct
  source 1..20: mol_type = other DNA
ctgcacacgctctcttgcct

SEQ ID NO: 292442 - DNA, 20 bp, synthetic construct
  source 1..20: mol_type = other DNA
cctgcacacgctctcttgcc

SEQ ID NO: 292443 - DNA, 20 bp, synthetic construct
  source 1..20: mol_type = other DNA
ccctgcacacgctctcttgc

SEQ ID NO: 292444 - DNA, 20 bp, synthetic construct
  source 1..20: mol_type = other DNA
cccctgcacacgctctcttg

SEQ ID NO: 292445 - DNA, 20 bp, synthetic construct
  source 1..20: mol_type = other DNA
tcccctgcacacgctctctt

SEQ ID NO: 292446 - DNA, 20 bp, synthetic construct
  source 1..20: mol_type = other DNA
ttcccctgcacacgctctct

SEQ ID NO: 292447 - DNA, 20 bp, synthetic construct
  source 1..20: mol_type = other DNA
gttcccctgcacacgctctc

SEQ ID NO: 292448 - DNA, 20 bp, synthetic construct
  source 1..20: mol_type = other DNA
agttcccctgcacacgctct

SEQ ID NO: 292449 - DNA, 20 bp, synthetic construct
  source 1..20: mol_type = other DNA
gagttcccctgcacacgctc

SEQ ID NO: 292450 - DNA, 20 bp, synthetic construct
  source 1..20: mol_type = other DNA
ggagttcccctgcacacgct

SEQ ID NO: 292451 - DNA, 20 bp, synthetic construct
  source 1..20: mol_type = other DNA
gggagttcccctgcacacgc

SEQ ID NO: 292452 - DNA, 20 bp, synthetic construct
  source 1..20: mol_type = other DNA
tgggagttcccctgcacacg

SEQ ID NO: 292453 - DNA, 20 bp, synthetic construct
  source 1..20: mol_type = other DNA
atgggagttcccctgcacac

SEQ ID NO: 292454 - DNA, 20 bp, synthetic construct
  source 1..20: mol_type = other DNA
aatgggagttcccctgcaca

SEQ ID NO: 292455 - DNA, 20 bp, synthetic construct
  source 1..20: mol_type = other DNA
aaatgggagttcccctgcac

SEQ ID NO: 292456 - DNA, 20 bp, synthetic construct
  source 1..20: mol_type = other DNA
taaatgggagttcccctgca

SEQ ID NO: 292457 - DNA, 20 bp, synthetic construct
  source 1..20: mol_type = other DNA
ataaatgggagttcccctgc

SEQ ID NO: 292458 - DNA, 20 bp, synthetic construct
  source 1..20: mol_type = other DNA
tataaatgggagttcccctg

SEQ ID NO: 292459 - DNA, 20 bp, synthetic construct
  source 1..20: mol_type = other DNA
ttataaatgggagttcccct

SEQ ID NO: 292460 - DNA, 20 bp, synthetic construct
  source 1..20: mol_type = other DNA
tttataaatgggagttcccc

SEQ ID NO: 292461 - DNA, 20 bp, synthetic construct
  source 1..20: mol_type = other DNA
ttttataaatgggagttccc

SEQ ID NO: 292462 - DNA, 20 bp, synthetic construct
  source 1..20: mol_type = other DNA
gttttataaatgggagttcc

SEQ ID NO: 292463 - DNA, 20 bp, synthetic construct
  source 1..20: mol_type = other DNA
ggttttataaatgggagttc

SEQ ID NO: 292464 - DNA, 20 bp, synthetic construct
  source 1..20: mol_type = other DNA
tggttttataaatgggagtt

SEQ ID NO: 292465 - DNA, 20 bp, synthetic construct
  source 1..20: mol_type = other DNA
atggttttataaatgggagt

SEQ ID NO: 292466 - DNA, 20 bp, synthetic construct
  source 1..20: mol_type = other DNA
gatggttttataaatgggag

SEQ ID NO: 292467 - DNA, 20 bp, synthetic construct
  source 1..20: mol_type = other DNA
tgatggttttataaatggga

SEQ ID NO: 292468 - DNA, 20 bp, synthetic construct
  source 1..20: mol_type = other DNA
ctgatggttttataaatggg

SEQ ID NO: 292469 - DNA, 20 bp, synthetic construct
  source 1..20: mol_type = other DNA
tctgatggttttataaatgg

SEQ ID NO: 292470 - DNA, 20 bp, synthetic construct
  source 1..20: mol_type = other DNA
gtctgatggttttataaatg

SEQ ID NO: 292471 - DNA, 20 bp, synthetic construct
  source 1..20: mol_type = other DNA
ggtctgatggttttataaat

SEQ ID NO: 292472 - DNA, 20 bp, synthetic construct
  source 1..20: mol_type = other DNA
aggtctgatggttttataaa

SEQ ID NO: 292473 - DNA, 20 bp, synthetic construct
  source 1..20: mol_type = other DNA
gaggtctgatggttttataa

SEQ ID NO: 292474 - DNA, 20 bp, synthetic construct
  source 1..20: mol_type = other DNA
tgaggtctgatggttttata

SEQ ID NO: 292475 - DNA, 20 bp, synthetic construct
  source 1..20: mol_type = other DNA
atgaggtctgatggttttat

SEQ ID NO: 292476 - DNA, 20 bp, synthetic construct
  source 1..20: mol_type = other DNA
catgaggtctgatggtttta

SEQ ID NO: 292477 - DNA, 20 bp, synthetic construct
  source 1..20: mol_type = other DNA
tcatgaggtctgatggtttt

SEQ ID NO: 292478 - DNA, 20 bp, synthetic construct
  source 1..20: mol_type = other DNA
ctcatgaggtctgatggttt

SEQ ID NO: 292479 - DNA, 20 bp, synthetic construct
  source 1..20: mol_type = other DNA
tctcatgaggtctgatggtt

SEQ ID NO: 292480 - DNA, 20 bp, synthetic construct
  source 1..20: mol_type = other DNA
atctcatgaggtctgatggt

SEQ ID NO: 292481 - DNA, 20 bp, synthetic construct
  source 1..20: mol_type = other DNA
aatctcatgaggtctgatgg

SEQ ID NO: 292482 - DNA, 20 bp, synthetic construct
  source 1..20: mol_type = other DNA
aaatctcatgaggtctgatg

SEQ ID NO: 292483 - DNA, 20 bp, synthetic construct
  source 1..20: mol_type = other DNA
taaatctcatgaggtctgat

SEQ ID NO: 292484 - DNA, 20 bp, synthetic construct
  source 1..20: mol_type = other DNA
ataaatctcatgaggtctga

SEQ ID NO: 292485 - DNA, 20 bp, synthetic construct
  source 1..20: mol_type = other DNA
aataaatctcatgaggtctg

SEQ ID NO: 292486 - DNA, 20 bp, synthetic construct
  source 1..20: mol_type = other DNA
gaataaatctcatgaggtct

SEQ ID NO: 292487 - DNA, 20 bp, synthetic construct
  source 1..20: mol_type = other DNA
tgaataaatctcatgaggtc

SEQ ID NO: 292488 - DNA, 20 bp, synthetic construct
  source 1..20: mol_type = other DNA
gtgaataaatctcatgaggt

SEQ ID NO: 292489 - DNA, 20 bp, synthetic construct
  source 1..20: mol_type = other DNA
agtgaataaatctcatgagg

SEQ ID NO: 292490 - DNA, 20 bp, synthetic construct
  source 1..20: mol_type = other DNA
tagtgaataaatctcatgag

SEQ ID NO: 292491 - DNA, 20 bp, synthetic construct
  source 1..20: mol_type = other DNA
atagtgaataaatctcatga

SEQ ID NO: 292492 - DNA, 20 bp, synthetic construct
  source 1..20: mol_type = other DNA
gatagtgaataaatctcatg

SEQ ID NO: 292493 - DNA, 20 bp, synthetic construct
  source 1..20: mol_type = other DNA
tgatagtgaataaatctcat

SEQ ID NO: 292494 - DNA, 20 bp, synthetic construct
  source 1..20: mol_type = other DNA
atgatagtgaataaatctca

SEQ ID NO: 292495 - DNA, 20 bp, synthetic construct
  source 1..20: mol_type = other DNA
catgatagtgaataaatctc

SEQ ID NO: 292496 - DNA, 20 bp, synthetic construct
  source 1..20: mol_type = other DNA
tcatgatagtgaataaatct

SEQ ID NO: 292497 - DNA, 20 bp, synthetic construct
  source 1..20: mol_type = other DNA
ctcatgatagtgaataaatc

SEQ ID NO: 292498 - DNA, 20 bp, synthetic construct
  source 1..20: mol_type = other DNA
tctcatgatagtgaataaat

SEQ ID NO: 292499 - DNA, 20 bp, synthetic construct
  source 1..20: mol_type = other DNA
ttctcatgatagtgaataaa

SEQ ID NO: 292500 - DNA, 20 bp, synthetic construct
  source 1..20: mol_type = other DNA
gttctcatgatagtgaataa

SEQ ID NO: 292501 - DNA, 20 bp, synthetic construct
  source 1..20: mol_type = other DNA
tgttctcatgatagtgaata

SEQ ID NO: 292502 - DNA, 20 bp, synthetic construct
  source 1..20: mol_type = other DNA
ctgttctcatgatagtgaat

SEQ ID NO: 292503 - DNA, 20 bp, synthetic construct
  source 1..20: mol_type = other DNA
gctgttctcatgatagtgaa

SEQ ID NO: 292504 - DNA, 20 bp, synthetic construct
  source 1..20: mol_type = other DNA
tgctgttctcatgatagtga

SEQ ID NO: 292505 - DNA, 20 bp, synthetic construct
  source 1..20: mol_type = other DNA
atgctgttctcatgatagtg

SEQ ID NO: 292506 - DNA, 20 bp, synthetic construct
  source 1..20: mol_type = other DNA
catgctgttctcatgatagt

SEQ ID NO: 292507 - DNA, 20 bp, synthetic construct
  source 1..20: mol_type = other DNA
ccatgctgttctcatgatag

SEQ ID NO: 292508 - DNA, 20 bp, synthetic construct
  source 1..20: mol_type = other DNA
cccatgctgttctcatgata

SEQ ID NO: 292509 - DNA, 20 bp, synthetic construct
  source 1..20: mol_type = other DNA
tcccatgctgttctcatgat

SEQ ID NO: 292510 - DNA, 20 bp, synthetic construct
  source 1..20: mol_type = other DNA
ttcccatgctgttctcatga

SEQ ID NO: 292511 - DNA, 20 bp, synthetic construct
  source 1..20: mol_type = other DNA
tttcccatgctgttctcatg

SEQ ID NO: 292512 - DNA, 20 bp, synthetic construct
  source 1..20: mol_type = other DNA
ctttcccatgctgttctcat

SEQ ID NO: 292513 - DNA, 20 bp, synthetic construct
  source 1..20: mol_type = other DNA
tctttcccatgctgttctca

SEQ ID NO: 292514 - DNA, 20 bp, synthetic construct
  source 1..20: mol_type = other DNA
gtctttcccatgctgttctc

SEQ ID NO: 292515 - DNA, 20 bp, synthetic construct
  source 1..20: mol_type = other DNA
ggtctttcccatgctgttct

SEQ ID NO: 292516 - DNA, 20 bp, synthetic construct
  source 1..20: mol_type = other DNA
gggtctttcccatgctgttc

SEQ ID NO: 292517 - DNA, 20 bp, synthetic construct
  source 1..20: mol_type = other DNA
cgggtctttcccatgctgtt

SEQ ID NO: 292518 - DNA, 20 bp, synthetic construct
  source 1..20: mol_type = other DNA
gcgggtctttcccatgctgt

SEQ ID NO: 292519 - DNA, 20 bp, synthetic construct
  source 1..20: mol_type = other DNA
ggcgggtctttcccatgctg

SEQ ID NO: 292520 - DNA, 20 bp, synthetic construct
  source 1..20: mol_type = other DNA
gggcgggtctttcccatgct

SEQ ID NO: 292521 - DNA, 20 bp, synthetic construct
  source 1..20: mol_type = other DNA
ggggcgggtctttcccatgc

SEQ ID NO: 292522 - DNA, 20 bp, synthetic construct
  source 1..20: mol_type = other DNA
gggggcgggtctttcccatg

SEQ ID NO: 292523 - DNA, 20 bp, synthetic construct
  source 1..20: mol_type = other DNA
tgggggcgggtctttcccat

SEQ ID NO: 292524 - DNA, 20 bp, synthetic construct
  source 1..20: mol_type = other DNA
atgggggcgggtctttccca

SEQ ID NO: 292525 - DNA, 20 bp, synthetic construct
  source 1..20: mol_type = other DNA
catgggggcgggtctttccc

SEQ ID NO: 292526 - DNA, 20 bp, synthetic construct
  source 1..20: mol_type = other DNA
tcatgggggcgggtctttcc

SEQ ID NO: 292527 - DNA, 20 bp, synthetic construct
  source 1..20: mol_type = other DNA
atcatgggggcgggtctttc

SEQ ID NO: 292528 - DNA, 20 bp, synthetic construct
  source 1..20: mol_type = other DNA
aatcatgggggcgggtcttt

SEQ ID NO: 292529 - DNA, 20 bp, synthetic construct
  source 1..20: mol_type = other DNA
gaatcatgggggcgggtctt

SEQ ID NO: 292530 - DNA, 20 bp, synthetic construct
  source 1..20: mol_type = other DNA
tgaatcatgggggcgggtct

SEQ ID NO: 292531 - DNA, 20 bp, synthetic construct
  source 1..20: mol_type = other DNA
ctgaatcatgggggcgggtc

SEQ ID NO: 292532 - DNA, 20 bp, synthetic construct
  source 1..20: mol_type = other DNA
actgaatcatgggggcgggt

SEQ ID NO: 292533 - DNA, 20 bp, synthetic construct
  source 1..20: mol_type = other DNA
aactgaatcatgggggcggg

SEQ ID NO: 292534 - DNA, 20 bp, synthetic construct
  source 1..20: mol_type = other DNA
taactgaatcatgggggcgg

SEQ ID NO: 292535 - DNA, 20 bp, synthetic construct
  source 1..20: mol_type = other DNA
gtaactgaatcatgggggcg

SEQ ID NO: 292536 - DNA, 20 bp, synthetic construct
  source 1..20: mol_type = other DNA
ggtaactgaatcatgggggc

SEQ ID NO: 292537 - DNA, 20 bp, synthetic construct
  source 1..20: mol_type = other DNA
aggtaactgaatcatggggg

SEQ ID NO: 292538 - DNA, 20 bp, synthetic construct
  source 1..20: mol_type = other DNA
gaggtaactgaatcatgggg

SEQ ID NO: 292539 - DNA, 20 bp, synthetic construct
  source 1..20: mol_type = other DNA
ggaggtaactgaatcatggg

SEQ ID NO: 292540 - DNA, 20 bp, synthetic construct
  source 1..20: mol_type = other DNA
gggaggtaactgaatcatgg

SEQ ID NO: 292541 - DNA, 20 bp, synthetic construct
  source 1..20: mol_type = other DNA
tgggaggtaactgaatcatg

SEQ ID NO: 292542 - DNA, 20 bp, synthetic construct
  source 1..20: mol_type = other DNA
gtgggaggtaactgaatcat

SEQ ID NO: 292543 - DNA, 20 bp, synthetic construct
  source 1..20: mol_type = other DNA
agtgggaggtaactgaatca

SEQ ID NO: 292544 - DNA, 20 bp, synthetic construct
  source 1..20: mol_type = other DNA
cagtgggaggtaactgaatc

SEQ ID NO: 292545 - DNA, 20 bp, synthetic construct
  source 1..20: mol_type = other DNA
ccagtgggaggtaactgaat

SEQ ID NO: 292546 - DNA, 20 bp, synthetic construct
  source 1..20: mol_type = other DNA
cccagtgggaggtaactgaa

SEQ ID NO: 292547 - DNA, 20 bp, synthetic construct
  source 1..20: mol_type = other DNA
acccagtgggaggtaactga

SEQ ID NO: 292548 - DNA, 20 bp, synthetic construct
  source 1..20: mol_type = other DNA
gacccagtgggaggtaactg

SEQ ID NO: 292549 - DNA, 20 bp, synthetic construct
  source 1..20: mol_type = other DNA
ggacccagtgggaggtaact

SEQ ID NO: 292550 - DNA, 20 bp, synthetic construct
  source 1..20: mol_type = other DNA
gggacccagtgggaggtaac

SEQ ID NO: 292551 - DNA, 20 bp, synthetic construct
  source 1..20: mol_type = other DNA
agggacccagtgggaggtaa

SEQ ID NO: 292552 - DNA, 20 bp, synthetic construct
  source 1..20: mol_type = other DNA
gagggacccagtgggaggta

SEQ ID NO: 292553 - DNA, 20 bp, synthetic construct
  source 1..20: mol_type = other DNA
ggagggacccagtgggaggt

SEQ ID NO: 292554 - DNA, 20 bp, synthetic construct
  source 1..20: mol_type = other DNA
gggagggacccagtgggagg

SEQ ID NO: 292555 - DNA, 20 bp, synthetic construct
  source 1..20: mol_type = other DNA
tgggagggacccagtgggag

SEQ ID NO: 292556 - DNA, 20 bp, synthetic construct
  source 1..20: mol_type = other DNA
atgggagggacccagtggga

SEQ ID NO: 292557 - DNA, 20 bp, synthetic construct
  source 1..20: mol_type = other DNA
catgggagggacccagtggg

SEQ ID NO: 292558 - DNA, 20 bp, synthetic construct
  source 1..20: mol_type = other DNA
tcatgggagggacccagtgg

SEQ ID NO: 292559 - DNA, 20 bp, synthetic construct
  source 1..20: mol_type = other DNA
gtcatgggagggacccagtg

SEQ ID NO: 292560 - DNA, 20 bp, synthetic construct
  source 1..20: mol_type = other DNA
tgtcatgggagggacccagt

SEQ ID NO: 292561 - DNA, 20 bp, synthetic construct
  source 1..20: mol_type = other DNA
gtgtcatgggagggacccag

SEQ ID NO: 292562 - DNA, 20 bp, synthetic construct
  source 1..20: mol_type = other DNA
tgtgtcatgggagggaccca

SEQ ID NO: 292563 - DNA, 20 bp, synthetic construct
  source 1..20: mol_type = other DNA
atgtgtcatgggagggaccc

SEQ ID NO: 292564 - DNA, 20 bp, synthetic construct
  source 1..20: mol_type = other DNA
catgtgtcatgggagggacc

SEQ ID NO: 292565 - DNA, 20 bp, synthetic construct
  source 1..20: mol_type = other DNA
ccatgtgtcatgggagggac

SEQ ID NO: 292566 - DNA, 20 bp, synthetic construct
  source 1..20: mol_type = other DNA
tccatgtgtcatgggaggga

SEQ ID NO: 292567 - DNA, 20 bp, synthetic construct
  source 1..20: mol_type = other DNA
ttccatgtgtcatgggaggg

SEQ ID NO: 292568 - DNA, 20 bp, synthetic construct
  source 1..20: mol_type = other DNA
attccatgtgtcatgggagg

SEQ ID NO: 292569 - DNA, 20 bp, synthetic construct
  source 1..20: mol_type = other DNA
aattccatgtgtcatgggag

SEQ ID NO: 292570 - DNA, 20 bp, synthetic construct
  source 1..20: mol_type = other DNA
taattccatgtgtcatggga

SEQ ID NO: 292571 - DNA, 20 bp, synthetic construct
  source 1..20: mol_type = other DNA
ataattccatgtgtcatggg

SEQ ID NO: 292572 - DNA, 20 bp, synthetic construct
  source 1..20: mol_type = other DNA
cataattccatgtgtcatgg

SEQ ID NO: 292573 - DNA, 20 bp, synthetic construct
  source 1..20: mol_type = other DNA
ccataattccatgtgtcatg

SEQ ID NO: 292574 - DNA, 20 bp, synthetic construct
  source 1..20: mol_type = other DNA
cccataattccatgtgtcat

SEQ ID NO: 292575 - DNA, 20 bp, synthetic construct
  source 1..20: mol_type = other DNA
tcccataattccatgtgtca

SEQ ID NO: 292576 - DNA, 20 bp, synthetic construct
  source 1..20: mol_type = other DNA
ctcccataattccatgtgtc

SEQ ID NO: 292577 - DNA, 20 bp, synthetic construct
  source 1..20: mol_type = other DNA
gctcccataattccatgtgt

SEQ ID NO: 292578 - DNA, 20 bp, synthetic construct
  source 1..20: mol_type = other DNA
agctcccataattccatgtg

SEQ ID NO: 292579 - DNA, 20 bp, synthetic construct
  source 1..20: mol_type = other DNA
tagctcccataattccatgt

SEQ ID NO: 292580 - DNA, 20 bp, synthetic construct
  source 1..20: mol_type = other DNA
gtagctcccataattccatg

SEQ ID NO: 292581 - DNA, 20 bp, synthetic construct
  source 1..20: mol_type = other DNA
tgtagctcccataattccat

SEQ ID NO: 292582 - DNA, 20 bp, synthetic construct
  source 1..20: mol_type = other DNA
ttgtagctcccataattcca

SEQ ID NO: 292583 - DNA, 20 bp, synthetic construct
  source 1..20: mol_type = other DNA
attgtagctcccataattcc

SEQ ID NO: 292584 - DNA, 20 bp, synthetic construct
  source 1..20: mol_type = other DNA
aattgtagctcccataattc

SEQ ID NO: 292585 - DNA, 20 bp, synthetic construct
  source 1..20: mol_type = other DNA
gaattgtagctcccataatt

SEQ ID NO: 292586 - DNA, 20 bp, synthetic construct
  source 1..20: mol_type = other DNA
tgaattgtagctcccataat

SEQ ID NO: 292587 - DNA, 20 bp, synthetic construct
  source 1..20: mol_type = other DNA
ttgaattgtagctcccataa

SEQ ID NO: 292588 - DNA, 20 bp, synthetic construct
  source 1..20: mol_type = other DNA
cttgaattgtagctcccata

SEQ ID NO: 292589 - DNA, 20 bp, synthetic construct
  source 1..20: mol_type = other DNA
tcttgaattgtagctcccat

SEQ ID NO: 292590 - DNA, 20 bp, synthetic construct
  source 1..20: mol_type = other DNA
atcttgaattgtagctccca

SEQ ID NO: 292591 - DNA, 20 bp, synthetic construct
  source 1..20: mol_type = other DNA
catcttgaattgtagctccc

SEQ ID NO: 292592 - DNA, 20 bp, synthetic construct
  source 1..20: mol_type = other DNA
tcatcttgaattgtagctcc

SEQ ID NO: 292593 - DNA, 20 bp, synthetic construct
  source 1..20: mol_type = other DNA
ctcatcttgaattgtagctc

SEQ ID NO: 292594 - DNA, 20 bp, synthetic construct
  source 1..20: mol_type = other DNA
tctcatcttgaattgtagct

SEQ ID NO: 292595 - DNA, 20 bp, synthetic construct
  source 1..20: mol_type = other DNA
atctcatcttgaattgtagc

SEQ ID NO: 292596 - DNA, 20 bp, synthetic construct
  source 1..20: mol_type = other DNA
aatctcatcttgaattgtag

SEQ ID NO: 292597 - DNA, 20 bp, synthetic construct
  source 1..20: mol_type = other DNA
aaatctcatcttgaattgta

SEQ ID NO: 292598 - DNA, 20 bp, synthetic construct
  source 1..20: mol_type = other DNA
caaatctcatcttgaattgt

SEQ ID NO: 292599 - DNA, 20 bp, synthetic construct
  source 1..20: mol_type = other DNA
ccaaatctcatcttgaattg

SEQ ID NO: 292600 - DNA, 20 bp, synthetic construct
  source 1..20: mol_type = other DNA
cccaaatctcatcttgaatt

SEQ ID NO: 292601 - DNA, 20 bp, synthetic construct
  source 1..20: mol_type = other DNA
acccaaatctcatcttgaat

SEQ ID NO: 292602 - DNA, 20 bp, synthetic construct
  source 1..20: mol_type = other DNA
cacccaaatctcatcttgaa

SEQ ID NO: 292603 - DNA, 20 bp, synthetic construct
  source 1..20: mol_type = other DNA
ccacccaaatctcatcttga

SEQ ID NO: 292604 - DNA, 20 bp, synthetic construct
  source 1..20: mol_type = other DNA
cccacccaaatctcatcttg

SEQ ID NO: 292605 - DNA, 20 bp, synthetic construct
  source 1..20: mol_type = other DNA
ccccacccaaatctcatctt

SEQ ID NO: 292606 - DNA, 20 bp, synthetic construct
  source 1..20: mol_type = other DNA
tccccacccaaatctcatct

SEQ ID NO: 292607 - DNA, 20 bp, synthetic construct
  source 1..20: mol_type = other DNA
gtccccacccaaatctcatc

SEQ ID NO: 292608 - DNA, 20 bp, synthetic construct
  source 1..20: mol_type = other DNA
tgtccccacccaaatctcat

SEQ ID NO: 292609 - DNA, 20 bp, synthetic construct
  source 1..20: mol_type = other DNA
gtgtccccacccaaatctca

SEQ ID NO: 292610 - DNA, 20 bp, synthetic construct
  source 1..20: mol_type = other DNA
tgtgtccccacccaaatctc

SEQ ID NO: 292611 - DNA, 20 bp, synthetic construct
  source 1..20: mol_type = other DNA
ctgtgtccccacccaaatct

SEQ ID NO: 292612 - DNA, 20 bp, synthetic construct
  source 1..20: mol_type = other DNA
gctgtgtccccacccaaatc

SEQ ID NO: 292613 - DNA, 20 bp, synthetic construct
  source 1..20: mol_type = other DNA
ggctgtgtccccacccaaat

SEQ ID NO: 292614 - DNA, 20 bp, synthetic construct
  source 1..20: mol_type = other DNA
tggctgtgtccccacccaaa

SEQ ID NO: 292615 - DNA, 20 bp, synthetic construct
  source 1..20: mol_type = other DNA
ttggctgtgtccccacccaa

SEQ ID NO: 292616 - DNA, 20 bp, synthetic construct
  source 1..20: mol_type = other DNA
tttggctgtgtccccaccca

SEQ ID NO: 292617 - DNA, 20 bp, synthetic construct
  source 1..20: mol_type = other DNA
gtttggctgtgtccccaccc

SEQ ID NO: 292618 - DNA, 20 bp, synthetic construct
  source 1..20: mol_type = other DNA
ggtttggctgtgtccccacc

SEQ ID NO: 292619 - DNA, 20 bp, synthetic construct
  source 1..20: mol_type = other DNA
tggtttggctgtgtccccac

SEQ ID NO: 292620 - DNA, 20 bp, synthetic construct
  source 1..20: mol_type = other DNA
atggtttggctgtgtcccca

SEQ ID NO: 292621 - DNA, 20 bp, synthetic construct
  source 1..20: mol_type = other DNA
tatggtttggctgtgtcccc

SEQ ID NO: 292622 - DNA, 20 bp, synthetic construct
  source 1..20: mol_type = other DNA
atatggtttggctgtgtccc

SEQ ID NO: 292623 - DNA, 20 bp, synthetic construct
  source 1..20: mol_type = other DNA
gatatggtttggctgtgtcc

SEQ ID NO: 292624 - DNA, 20 bp, synthetic construct
  source 1..20: mol_type = other DNA
tgatatggtttggctgtgtc

SEQ ID NO: 292625 - DNA, 20 bp, synthetic construct
  source 1..20: mol_type = other DNA
ctgatatggtttggctgtgt

SEQ ID NO: 292626 - DNA, 20 bp, synthetic construct
  source 1..20: mol_type = other DNA
actgatatggtttggctgtg

SEQ ID NO: 292627 - DNA, 20 bp, synthetic construct
  source 1..20: mol_type = other DNA
gactgatatggtttggctgt

SEQ ID NO: 292628 - DNA, 20 bp, synthetic construct
  source 1..20: mol_type = other DNA
agactgatatggtttggctg

SEQ ID NO: 292629 - DNA, 20 bp, synthetic construct
  source 1..20: mol_type = other DNA
gagactgatatggtttggct

SEQ ID NO: 292630 - DNA, 20 bp, synthetic construct
  source 1..20: mol_type = other DNA
ggagactgatatggtttggc

SEQ ID NO: 292631 - DNA, 20 bp, synthetic construct
  source 1..20: mol_type = other DNA
gggagactgatatggtttgg

SEQ ID NO: 292632 - DNA, 20 bp, synthetic construct
  source 1..20: mol_type = other DNA
agggagactgatatggtttg

SEQ ID NO: 292633 - DNA, 20 bp, synthetic construct
  source 1..20: mol_type = other DNA
gagggagactgatatggttt

SEQ ID NO: 292634 - DNA, 20 bp, synthetic construct
  source 1..20: mol_type = other DNA
agagggagactgatatggtt

SEQ ID NO: 292635 - DNA, 20 bp, synthetic construct
  source 1..20: mol_type = other DNA
cagagggagactgatatggt

SEQ ID NO: 292636 - DNA, 20 bp, synthetic construct
  source 1..20: mol_type = other DNA
acagagggagactgatatgg

SEQ ID NO: 292637 - DNA, 20 bp, synthetic construct
  source 1..20: mol_type = other DNA
gacagagggagactgatatg

SEQ ID NO: 292638 - DNA, 20 bp, synthetic construct
  source 1..20: mol_type = other DNA
tgacagagggagactgatat

SEQ ID NO: 292639 - DNA, 20 bp, synthetic construct
  source 1..20: mol_type = other DNA
atgacagagggagactgata

SEQ ID NO: 292640 - DNA, 20 bp, synthetic construct
  source 1..20: mol_type = other DNA
gatgacagagggagactgat

SEQ ID NO: 292641 - DNA, 20 bp, synthetic construct
  source 1..20: mol_type = other DNA
ggatgacagagggagactga

SEQ ID NO: 292642 - DNA, 20 bp, synthetic construct
  source 1..20: mol_type = other DNA
tggatgacagagggagactg

SEQ ID NO: 292643 - DNA, 20 bp, synthetic construct
  source 1..20: mol_type = other DNA
ctggatgacagagggagact

SEQ ID NO: 292644 - DNA, 20 bp, synthetic construct
  source 1..20: mol_type = other DNA
cctggatgacagagggagac

SEQ ID NO: 292645 - DNA, 20 bp, synthetic construct
  source 1..20: mol_type = other DNA
gcctggatgacagagggaga

SEQ ID NO: 292646 - DNA, 20 bp, synthetic construct
  source 1..20: mol_type = other DNA
agcctggatgacagagggag

SEQ ID NO: 292647 - DNA, 20 bp, synthetic construct
  source 1..20: mol_type = other DNA
cagcctggatgacagaggga

SEQ ID NO: 292648 - DNA, 20 bp, synthetic construct
  source 1..20: mol_type = other DNA
ccagcctggatgacagaggg

SEQ ID NO: 292649 - DNA, 20 bp, synthetic construct
  source 1..20: mol_type = other DNA
tccagcctggatgacagagg

SEQ ID NO: 292650 - DNA, 20 bp, synthetic construct
  source 1..20: mol_type = other DNA
ctccagcctggatgacagag

SEQ ID NO: 292651 - DNA, 20 bp, synthetic construct
  source 1..20: mol_type = other DNA
actccagcctggatgacaga

SEQ ID NO: 292652 - DNA, 20 bp, synthetic construct
  source 1..20: mol_type = other DNA
cactccagcctggatgacag

SEQ ID NO: 292653 - DNA, 20 bp, synthetic construct
  source 1..20: mol_type = other DNA
gcactccagcctggatgaca

SEQ ID NO: 292654 - DNA, 20 bp, synthetic construct
  source 1..20: mol_type = other DNA
tgcactccagcctggatgac

SEQ ID NO: 292655 - DNA, 20 bp, synthetic construct
  source 1..20: mol_type = other DNA
gtgcactccagcctggatga

SEQ ID NO: 292656 - DNA, 20 bp, synthetic construct
  source 1..20: mol_type = other DNA
agtgcactccagcctggatg

SEQ ID NO: 292657 - DNA, 20 bp, synthetic construct
  source 1..20: mol_type = other DNA
cagtgcactccagcctggat

SEQ ID NO: 292658 - DNA, 20 bp, synthetic construct
  source 1..20: mol_type = other DNA
ccagtgcactccagcctgga

SEQ ID NO: 292659 - DNA, 20 bp, synthetic construct
  source 1..20: mol_type = other DNA
gccagtgcactccagcctgg

SEQ ID NO: 292660 - DNA, 20 bp, synthetic construct
  source 1..20: mol_type = other DNA
tgccagtgcactccagcctg

SEQ ID NO: 292661 - DNA, 20 bp, synthetic construct
  source 1..20: mol_type = other DNA
atgccagtgcactccagcct

SEQ ID NO: 292662 - DNA, 20 bp, synthetic construct
  source 1..20: mol_type = other DNA
catgccagtgcactccagcc

SEQ ID NO: 292663 - DNA, 20 bp, synthetic construct
  source 1..20: mol_type = other DNA
tcatgccagtgcactccagc

SEQ ID NO: 292664 - DNA, 20 bp, synthetic construct
  source 1..20: mol_type = other DNA
atcatgccagtgcactccag

SEQ ID NO: 292665 - DNA, 20 bp, synthetic construct
  source 1..20: mol_type = other DNA
gatcatgccagtgcactcca

SEQ ID NO: 292666 - DNA, 20 bp, synthetic construct
  source 1..20: mol_type = other DNA
agatcatgccagtgcactcc

SEQ ID NO: 292667 - DNA, 20 bp, synthetic construct
  source 1..20: mol_type = other DNA
gagatcatgccagtgcactc

SEQ ID NO: 292668 - DNA, 20 bp, synthetic construct
  source 1..20: mol_type = other DNA
cgagatcatgccagtgcact

SEQ ID NO: 292669 - DNA, 20 bp, synthetic construct
  source 1..20: mol_type = other DNA
ccgagatcatgccagtgcac

SEQ ID NO: 292670 - DNA, 20 bp, synthetic construct
  source 1..20: mol_type = other DNA
gccgagatcatgccagtgca

SEQ ID NO: 292671 - DNA, 20 bp, synthetic construct
  source 1..20: mol_type = other DNA
agccgagatcatgccagtgc

SEQ ID NO: 292672 - DNA, 20 bp, synthetic construct
  source 1..20: mol_type = other DNA
gagccgagatcatgccagtg

SEQ ID NO: 292673 - DNA, 20 bp, synthetic construct
  source 1..20: mol_type = other DNA
tgagccgagatcatgccagt

SEQ ID NO: 292674 - DNA, 20 bp, synthetic construct
  source 1..20: mol_type = other DNA
gtgagccgagatcatgccag

SEQ ID NO: 292675 - DNA, 20 bp, synthetic construct
  source 1..20: mol_type = other DNA
agtgagccgagatcatgcca

SEQ ID NO: 292676 - DNA, 20 bp, synthetic construct
  source 1..20: mol_type = other DNA
cagtgagccgagatcatgcc

SEQ ID NO: 292677 - DNA, 20 bp, synthetic construct
  source 1..20: mol_type = other DNA
gcagtgagccgagatcatgc

SEQ ID NO: 292678 - DNA, 20 bp, synthetic construct
  source 1..20: mol_type = other DNA
tgcagtgagccgagatcatg

SEQ ID NO: 292679 - DNA, 20 bp, synthetic construct
  source 1..20: mol_type = other DNA
ctgcagtgagccgagatcat

SEQ ID NO: 292680 - DNA, 20 bp, synthetic construct
  source 1..20: mol_type = other DNA
gctgcagtgagccgagatca

SEQ ID NO: 292681 - DNA, 20 bp, synthetic construct
  source 1..20: mol_type = other DNA
ggctgcagtgagccgagatc

SEQ ID NO: 292682 - DNA, 20 bp, synthetic construct
  source 1..20: mol_type = other DNA
aggctgcagtgagccgagat

SEQ ID NO: 292683 - DNA, 20 bp, synthetic construct
  source 1..20: mol_type = other DNA
gaggctgcagtgagccgaga

SEQ ID NO: 292684 - DNA, 20 bp, synthetic construct
  source 1..20: mol_type = other DNA
agaggctgcagtgagccgag

SEQ ID NO: 292685 - DNA, 20 bp, synthetic construct
  source 1..20: mol_type = other DNA
tagaggctgcagtgagccga

SEQ ID NO: 292686 - DNA, 20 bp, synthetic construct
  source 1..20: mol_type = other DNA
gtagaggctgcagtgagccg

SEQ ID NO: 292687 - DNA, 20 bp, synthetic construct
  source 1..20: mol_type = other DNA
ggtagaggctgcagtgagcc

SEQ ID NO: 292688 - DNA, 20 bp, synthetic construct
  source 1..20: mol_type = other DNA
aggtagaggctgcagtgagc

SEQ ID NO: 292689 - DNA, 20 bp, synthetic construct
  source 1..20: mol_type = other DNA
gaggtagaggctgcagtgag

SEQ ID NO: 292690 - DNA, 20 bp, synthetic construct
  source 1..20: mol_type = other DNA
ggaggtagaggctgcagtga

SEQ ID NO: 292691 - DNA, 20 bp, synthetic construct
  source 1..20: mol_type = other DNA
gggaggtagaggctgcagtg

SEQ ID NO: 292692 - DNA, 20 bp, synthetic construct
  source 1..20: mol_type = other DNA
agggaggtagaggctgcagt

SEQ ID NO: 292693 - DNA, 20 bp, synthetic construct
  source 1..20: mol_type = other DNA
cagggaggtagaggctgcag

SEQ ID NO: 292694 - DNA, 20 bp, synthetic construct
  source 1..20: mol_type = other DNA
ccagggaggtagaggctgca

SEQ ID NO: 292695 - DNA, 20 bp, synthetic construct
  source 1..20: mol_type = other DNA
cccagggaggtagaggctgc

SEQ ID NO: 292696 - DNA, 20 bp, synthetic construct
  source 1..20: mol_type = other DNA
acccagggaggtagaggctg

SEQ ID NO: 292697 - DNA, 20 bp, synthetic construct
  source 1..20: mol_type = other DNA
gacccagggaggtagaggct

SEQ ID NO: 292698 - DNA, 20 bp, synthetic construct
  source 1..20: mol_type = other DNA
tgacccagggaggtagaggc

SEQ ID NO: 292699 - DNA, 20 bp, synthetic construct
  source 1..20: mol_type = other DNA
ctgacccagggaggtagagg

SEQ ID NO: 292700 - DNA, 20 bp, synthetic construct
  source 1..20: mol_type = other DNA
cctgacccagggaggtagag

SEQ ID NO: 292701 - DNA, 20 bp, synthetic construct
  source 1..20: mol_type = other DNA
acctgacccagggaggtaga

SEQ ID NO: 292702 - DNA, 20 bp, synthetic construct
  source 1..20: mol_type = other DNA
cacctgacccagggaggtag

SEQ ID NO: 292703 - DNA, 20 bp, synthetic construct
  source 1..20: mol_type = other DNA
tcacctgacccagggaggta

SEQ ID NO: 292704 - DNA, 20 bp, synthetic construct
  source 1..20: mol_type = other DNA
atcacctgacccagggaggt

SEQ ID NO: 292705 - DNA, 20 bp, synthetic construct
  source 1..20: mol_type = other DNA
gatcacctgacccagggagg

SEQ ID NO: 292706 - DNA, 20 bp, synthetic construct
  source 1..20: mol_type = other DNA
agatcacctgacccagggag

SEQ ID NO: 292707 - DNA, 20 bp, synthetic construct
  source 1..20: mol_type = other DNA
aagatcacctgacccaggga

SEQ ID NO: 292708 - DNA, 20 bp, synthetic construct
  source 1..20: mol_type = other DNA
gaagatcacctgacccaggg

SEQ ID NO: 292709 - DNA, 20 bp, synthetic construct
  source 1..20: mol_type = other DNA
ggaagatcacctgacccagg

SEQ ID NO: 292710 - DNA, 20 bp, synthetic construct
  source 1..20: mol_type = other DNA
gggaagatcacctgacccag

SEQ ID NO: 292711 - DNA, 20 bp, synthetic construct
  source 1..20: mol_type = other DNA
tgggaagatcacctgaccca

SEQ ID NO: 292712 - DNA, 20 bp, synthetic construct
  source 1..20: mol_type = other DNA
gtgggaagatcacctgaccc

SEQ ID NO: 292713 - DNA, 20 bp, synthetic construct
  source 1..20: mol_type = other DNA
ggtgggaagatcacctgacc

SEQ ID NO: 292714 - DNA, 20 bp, synthetic construct
  source 1..20: mol_type = other DNA
aggtgggaagatcacctgac

SEQ ID NO: 292715 - DNA, 20 bp, synthetic construct
  source 1..20: mol_type = other DNA
gaggtgggaagatcacctga

SEQ ID NO: 292716 - DNA, 20 bp, synthetic construct
  source 1..20: mol_type = other DNA
tgaggtgggaagatcacctg

SEQ ID NO: 292717 - DNA, 20 bp, synthetic construct
  source 1..20: mol_type = other DNA
ctgaggtgggaagatcacct

SEQ ID NO: 292718 - DNA, 20 bp, synthetic construct
  source 1..20: mol_type = other DNA
gctgaggtgggaagatcacc

SEQ ID NO: 292719 - DNA, 20 bp, synthetic construct
  source 1..20: mol_type = other DNA
ggctgaggtgggaagatcac

SEQ ID NO: 292720 - DNA, 20 bp, synthetic construct
  source 1..20: mol_type = other DNA
aggctgaggtgggaagatca

SEQ ID NO: 292721 - DNA, 20 bp, synthetic construct
  source 1..20: mol_type = other DNA
gaggctgaggtgggaagatc

SEQ ID NO: 292722 - DNA, 20 bp, synthetic construct
  source 1..20: mol_type = other DNA
ggaggctgaggtgggaagat

SEQ ID NO: 292723 - DNA, 20 bp, synthetic construct
  source 1..20: mol_type = other DNA
gggaggctgaggtgggaaga

SEQ ID NO: 292724 - DNA, 20 bp, synthetic construct
  source 1..20: mol_type = other DNA
tgggaggctgaggtgggaag

SEQ ID NO: 292725 - DNA, 20 bp, synthetic construct
  source 1..20: mol_type = other DNA
ctgggaggctgaggtgggaa

SEQ ID NO: 292726 - DNA, 20 bp, synthetic construct
  source 1..20: mol_type = other DNA
cctgggaggctgaggtggga

SEQ ID NO: 292727 - DNA, 20 bp, synthetic construct
  source 1..20: mol_type = other DNA
acctgggaggctgaggtggg

SEQ ID NO: 292728 - DNA, 20 bp, synthetic construct
  source 1..20: mol_type = other DNA
tacctgggaggctgaggtgg

SEQ ID NO: 292729 - DNA, 20 bp, synthetic construct
  source 1..20: mol_type = other DNA
ctacctgggaggctgaggtg

SEQ ID NO: 292730 - DNA, 20 bp, synthetic construct
  source 1..20: mol_type = other DNA
gctacctgggaggctgaggt

SEQ ID NO: 292731 - DNA, 20 bp, synthetic construct
  source 1..20: mol_type = other DNA
agctacctgggaggctgagg

SEQ ID NO: 292732 - DNA, 20 bp, synthetic construct
  source 1..20: mol_type = other DNA
cagctacctgggaggctgag

SEQ ID NO: 292733 - DNA, 20 bp, synthetic construct
  source 1..20: mol_type = other DNA
ccagctacctgggaggctga

SEQ ID NO: 292734 - DNA, 20 bp, synthetic construct
  source 1..20: mol_type = other DNA
tccagctacctgggaggctg

SEQ ID NO: 292735 - DNA, 20 bp, synthetic construct
  source 1..20: mol_type = other DNA
ttccagctacctgggaggct

SEQ ID NO: 292736 - DNA, 20 bp, synthetic construct
  source 1..20: mol_type = other DNA
gttccagctacctgggaggc

SEQ ID NO: 292737 - DNA, 20 bp, synthetic construct
  source 1..20: mol_type = other DNA
agttccagctacctgggagg

SEQ ID NO: 292738 - DNA, 20 bp, synthetic construct
  source 1..20: mol_type = other DNA
tagttccagctacctgggag

SEQ ID NO: 292739 - DNA, 20 bp, synthetic construct
  source 1..20: mol_type = other DNA
gtagttccagctacctggga

SEQ ID NO: 292740 - DNA, 20 bp, synthetic construct
  source 1..20: mol_type = other DNA
tgtagttccagctacctggg

SEQ ID NO: 292741 - DNA, 20 bp, synthetic construct
  source 1..20: mol_type = other DNA
ctgtagttccagctacctgg

SEQ ID NO: 292742 - DNA, 20 bp, synthetic construct
  source 1..20: mol_type = other DNA
cctgtagttccagctacctg

SEQ ID NO: 292743 - DNA, 20 bp, synthetic construct
  source 1..20: mol_type = other DNA
acctgtagttccagctacct

SEQ ID NO: 292744 - DNA, 20 bp, synthetic construct
  source 1..20: mol_type = other DNA
tacctgtagttccagctacc

SEQ ID NO: 292745 - DNA, 20 bp, synthetic construct
  source 1..20: mol_type = other DNA
gtacctgtagttccagctac

SEQ ID NO: 292746 - DNA, 20 bp, synthetic construct
  source 1..20: mol_type = other DNA
ggtacctgtagttccagcta

SEQ ID NO: 292747 - DNA, 20 bp, synthetic construct
  source 1..20: mol_type = other DNA
aggtacctgtagttccagct

SEQ ID NO: 292748 - DNA, 20 bp, synthetic construct
  source 1..20: mol_type = other DNA
caggtacctgtagttccagc

SEQ ID NO: 292749 - DNA, 20 bp, synthetic construct
  source 1..20: mol_type = other DNA
gcaggtacctgtagttccag

SEQ ID NO: 292750 - DNA, 20 bp, synthetic construct
  source 1..20: mol_type = other DNA
ggcaggtacctgtagttcca

SEQ ID NO: 292751 - DNA, 20 bp, synthetic construct
  source 1..20: mol_type = other DNA
tggcaggtacctgtagttcc

SEQ ID NO: 292752 - DNA, 20 bp, synthetic construct
  source 1..20: mol_type = other DNA
gtggcaggtacctgtagttc

SEQ ID NO: 292753 - DNA, 20 bp, synthetic construct
  source 1..20: mol_type = other DNA
agtggcaggtacctgtagtt

SEQ ID NO: 292754 - DNA, 20 bp, synthetic construct
  source 1..20: mol_type = other DNA
tagtggcaggtacctgtagt

SEQ ID NO: 292755 - DNA, 20 bp, synthetic construct
  source 1..20: mol_type = other DNA
atagtggcaggtacctgtag

SEQ ID NO: 292756 - DNA, 20 bp, synthetic construct
  source 1..20: mol_type = other DNA
catagtggcaggtacctgta

SEQ ID NO: 292757 - DNA, 20 bp, synthetic construct
  source 1..20: mol_type = other DNA
gcatagtggcaggtacctgt

SEQ ID NO: 292758 - DNA, 20 bp, synthetic construct
  source 1..20: mol_type = other DNA
ggcatagtggcaggtacctg

SEQ ID NO: 292759 - DNA, 20 bp, synthetic construct
  source 1..20: mol_type = other DNA
aggcatagtggcaggtacct

SEQ ID NO: 292760 - DNA, 20 bp, synthetic construct
  source 1..20: mol_type = other DNA
caggcatagtggcaggtacc

SEQ ID NO: 292761 - DNA, 20 bp, synthetic construct
  source 1..20: mol_type = other DNA
ccaggcatagtggcaggtac

SEQ ID NO: 292762 - DNA, 20 bp, synthetic construct
  source 1..20: mol_type = other DNA
gccaggcatagtggcaggta

SEQ ID NO: 292763 - DNA, 20 bp, synthetic construct
  source 1..20: mol_type = other DNA
agccaggcatagtggcaggt

SEQ ID NO: 292764 - DNA, 20 bp, synthetic construct
  source 1..20: mol_type = other DNA
tagccaggcatagtggcagg

SEQ ID NO: 292765 - DNA, 20 bp, synthetic construct
  source 1..20: mol_type = other DNA
ttagccaggcatagtggcag

SEQ ID NO: 292766 - DNA, 20 bp, synthetic construct
  source 1..20: mol_type = other DNA
tttagccaggcatagtggca

SEQ ID NO: 292767 - DNA, 20 bp, synthetic construct
  source 1..20: mol_type = other DNA
atttagccaggcatagtggc

SEQ ID NO: 292768 - DNA, 20 bp, synthetic construct
  source 1..20: mol_type = other DNA
tatttagccaggcatagtgg

SEQ ID NO: 292769 - DNA, 20 bp, synthetic construct
  source 1..20: mol_type = other DNA
atatttagccaggcatagtg

SEQ ID NO: 292770 - DNA, 20 bp, synthetic construct
  source 1..20: mol_type = other DNA
aatatttagccaggcatagt

SEQ ID NO: 292771 - DNA, 20 bp, synthetic construct
  source 1..20: mol_type = other DNA
aaatatttagccaggcatag

SEQ ID NO: 292772 - DNA, 20 bp, synthetic construct
  source 1..20: mol_type = other DNA
aaaatatttagccaggcata

SEQ ID NO: 292773 - DNA, 20 bp, synthetic construct
  source 1..20: mol_type = other DNA
caaaatatttagccaggcat

SEQ ID NO: 292774 - DNA, 20 bp, synthetic construct
  source 1..20: mol_type = other DNA
acaaaatatttagccaggca

SEQ ID NO: 292775 - DNA, 20 bp, synthetic construct
  source 1..20: mol_type = other DNA
tacaaaatatttagccaggc

SEQ ID NO: 292776 - DNA, 20 bp, synthetic construct
  source 1..20: mol_type = other DNA
atacaaaatatttagccagg

SEQ ID NO: 292777 - DNA, 20 bp, synthetic construct
  source 1..20: mol_type = other DNA
aatacaaaatatttagccag

SEQ ID NO: 292778 - DNA, 20 bp, synthetic construct
  source 1..20: mol_type = other DNA
aaatacaaaatatttagcca

SEQ ID NO: 292779 - DNA, 20 bp, synthetic construct
  source 1..20: mol_type = other DNA
gaaatacaaaatatttagcc

SEQ ID NO: 292780 - DNA, 20 bp, synthetic construct
  source 1..20: mol_type = other DNA
ggaaatacaaaatatttagc

SEQ ID NO: 292781 - DNA, 20 bp, synthetic construct
  source 1..20: mol_type = other DNA
aggaaatacaaaatatttag

SEQ ID NO: 292782 - DNA, 20 bp, synthetic construct
  source 1..20: mol_type = other DNA
caggaaatacaaaatattta

SEQ ID NO: 292783 - DNA, 20 bp, synthetic construct
  source 1..20: mol_type = other DNA
acaggaaatacaaaatattt

SEQ ID NO: 292784 - DNA, 20 bp, synthetic construct
  source 1..20: mol_type = other DNA
cacaggaaatacaaaatatt

SEQ ID NO: 292785 - DNA, 20 bp, synthetic construct
  source 1..20: mol_type = other DNA
ccacaggaaatacaaaatat

SEQ ID NO: 292786 - DNA, 20 bp, synthetic construct
  source 1..20: mol_type = other DNA
tccacaggaaatacaaaata

SEQ ID NO: 292787 - DNA, 20 bp, synthetic construct
  source 1..20: mol_type = other DNA
ctccacaggaaatacaaaat

SEQ ID NO: 292788 - DNA, 20 bp, synthetic construct
  source 1..20: mol_type = other DNA
tctccacaggaaatacaaaa

SEQ ID NO: 292789 - DNA, 20 bp, synthetic construct
  source 1..20: mol_type = other DNA
gtctccacaggaaatacaaa

SEQ ID NO: 292790 - DNA, 20 bp, synthetic construct
  source 1..20: mol_type = other DNA
cgtctccacaggaaatacaa

SEQ ID NO: 292791 - DNA, 20 bp, synthetic construct
  source 1..20: mol_type = other DNA
tcgtctccacaggaaataca

SEQ ID NO: 292792 - DNA, 20 bp, synthetic construct
  source 1..20: mol_type = other DNA
ctcgtctccacaggaaatac

SEQ ID NO: 292793 - DNA, 20 bp, synthetic construct
  source 1..20: mol_type = other DNA
cctcgtctccacaggaaata

SEQ ID NO: 292794 - DNA, 20 bp, synthetic construct
  source 1..20: mol_type = other DNA
acctcgtctccacaggaaat

SEQ ID NO: 292795 - DNA, 20 bp, synthetic construct
  source 1..20: mol_type = other DNA
aacctcgtctccacaggaaa

SEQ ID NO: 292796 - DNA, 20 bp, synthetic construct
  source 1..20: mol_type = other DNA
aaacctcgtctccacaggaa

SEQ ID NO: 292797 - DNA, 20 bp, synthetic construct
  source 1..20: mol_type = other DNA
aaaacctcgtctccacagga

SEQ ID NO: 292798 - DNA, 20 bp, synthetic construct
  source 1..20: mol_type = other DNA
caaaacctcgtctccacagg

SEQ ID NO: 292799 - DNA, 20 bp, synthetic construct
  source 1..20: mol_type = other DNA
gcaaaacctcgtctccacag

SEQ ID NO: 292800 - DNA, 20 bp, synthetic construct
  source 1..20: mol_type = other DNA
ggcaaaacctcgtctccaca

SEQ ID NO: 292801 - DNA, 20 bp, synthetic construct
  source 1..20: mol_type = other DNA
tggcaaaacctcgtctccac

SEQ ID NO: 292802 - DNA, 20 bp, synthetic construct
  source 1..20: mol_type = other DNA
gtggcaaaacctcgtctcca

SEQ ID NO: 292803 - DNA, 20 bp, synthetic construct
  source 1..20: mol_type = other DNA
cgtggcaaaacctcgtctcc

SEQ ID NO: 292804 - DNA, 20 bp, synthetic construct
  source 1..20: mol_type = other DNA
acgtggcaaaacctcgtctc

SEQ ID NO: 292805 - DNA, 20 bp, synthetic construct
  source 1..20: mol_type = other DNA
aacgtggcaaaacctcgtct

SEQ ID NO: 292806 - DNA, 20 bp, synthetic construct
  source 1..20: mol_type = other DNA
caacgtggcaaaacctcgtc

SEQ ID NO: 292807 - DNA, 20 bp, synthetic construct
  source 1..20: mol_type = other DNA
gcaacgtggcaaaacctcgt

SEQ ID NO: 292808 - DNA, 20 bp, synthetic construct
  source 1..20: mol_type = other DNA
ggcaacgtggcaaaacctcg

SEQ ID NO: 292809 - DNA, 20 bp, synthetic construct
  source 1..20: mol_type = other DNA
gggcaacgtggcaaaacctc

SEQ ID NO: 292810 - DNA, 20 bp, synthetic construct
  source 1..20: mol_type = other DNA
tgggcaacgtggcaaaacct

SEQ ID NO: 292811 - DNA, 20 bp, synthetic construct
  source 1..20: mol_type = other DNA
ctgggcaacgtggcaaaacc

SEQ ID NO: 292812 - DNA, 20 bp, synthetic construct
  source 1..20: mol_type = other DNA
cctgggcaacgtggcaaaac

SEQ ID NO: 292813 - DNA, 20 bp, synthetic construct
  source 1..20: mol_type = other DNA
gcctgggcaacgtggcaaaa

SEQ ID NO: 292814 - DNA, 20 bp, synthetic construct
  source 1..20: mol_type = other DNA
agcctgggcaacgtggcaaa

SEQ ID NO: 292815 - DNA, 20 bp, synthetic construct
  source 1..20: mol_type = other DNA
cagcctgggcaacgtggcaa

SEQ ID NO: 292816 - DNA, 20 bp, synthetic construct
  source 1..20: mol_type = other DNA
ccagcctgggcaacgtggca

SEQ ID NO: 292817 - DNA, 20 bp, synthetic construct
  source 1..20: mol_type = other DNA
accagcctgggcaacgtggc

SEQ ID NO: 292818 - DNA, 20 bp, synthetic construct
  source 1..20: mol_type = other DNA
gaccagcctgggcaacgtgg

SEQ ID NO: 292819 - DNA, 20 bp, synthetic construct
  source 1..20: mol_type = other DNA
agaccagcctgggcaacgtg

SEQ ID NO: 292820 - DNA, 20 bp, synthetic construct
  source 1..20: mol_type = other DNA
aagaccagcctgggcaacgt

SEQ ID NO: 292821 - DNA, 20 bp, synthetic construct
  source 1..20: mol_type = other DNA
caagaccagcctgggcaacg

SEQ ID NO: 292822 - DNA, 20 bp, synthetic construct
  source 1..20: mol_type = other DNA
tcaagaccagcctgggcaac

SEQ ID NO: 292823 - DNA, 20 bp, synthetic construct
  source 1..20: mol_type = other DNA
ttcaagaccagcctgggcaa

SEQ ID NO: 292824 - DNA, 20 bp, synthetic construct
  source 1..20: mol_type = other DNA
gttcaagaccagcctgggca

SEQ ID NO: 292825 - DNA, 20 bp, synthetic construct
  source 1..20: mol_type = other DNA
agttcaagaccagcctgggc

SEQ ID NO: 292826 - DNA, 20 bp, synthetic construct
  source 1..20: mol_type = other DNA
gagttcaagaccagcctggg

SEQ ID NO: 292827 - DNA, 20 bp, synthetic construct
  source 1..20: mol_type = other DNA
ggagttcaagaccagcctgg

SEQ ID NO: 292828 - DNA, 20 bp, synthetic construct
  source 1..20: mol_type = other DNA
aggagttcaagaccagcctg

SEQ ID NO: 292829 - DNA, 20 bp, synthetic construct
  source 1..20: mol_type = other DNA
caggagttcaagaccagcct

SEQ ID NO: 292830 - DNA, 20 bp, synthetic construct
  source 1..20: mol_type = other DNA
tcaggagttcaagaccagcc

SEQ ID NO: 292831 - DNA, 20 bp, synthetic construct
  source 1..20: mol_type = other DNA
ctcaggagttcaagaccagc

SEQ ID NO: 292832 - DNA, 20 bp, synthetic construct
  source 1..20: mol_type = other DNA
cctcaggagttcaagaccag

SEQ ID NO: 292833 - DNA, 20 bp, synthetic construct
  source 1..20: mol_type = other DNA
acctcaggagttcaagacca

SEQ ID NO: 292834 - DNA, 20 bp, synthetic construct
  source 1..20: mol_type = other DNA
gacctcaggagttcaagacc

SEQ ID NO: 292835 - DNA, 20 bp, synthetic construct
  source 1..20: mol_type = other DNA
tgacctcaggagttcaagac

SEQ ID NO: 292836 - DNA, 20 bp, synthetic construct
  source 1..20: mol_type = other DNA
ttgacctcaggagttcaaga

SEQ ID NO: 292837 - DNA, 20 bp, synthetic construct
  source 1..20: mol_type = other DNA
cttgacctcaggagttcaag

SEQ ID NO: 292838 - DNA, 20 bp, synthetic construct
  source 1..20: mol_type = other DNA
gcttgacctcaggagttcaa

SEQ ID NO: 292839 - DNA, 20 bp, synthetic construct
  source 1..20: mol_type = other DNA
tgcttgacctcaggagttca

SEQ ID NO: 292840 - DNA, 20 bp, synthetic construct
  source 1..20: mol_type = other DNA
ttgcttgacctcaggagttc

SEQ ID NO: 292841 - DNA, 20 bp, synthetic construct
  source 1..20: mol_type = other DNA
attgcttgacctcaggagtt

SEQ ID NO: 292842 - DNA, 20 bp, synthetic construct
  source 1..20: mol_type = other DNA
tattgcttgacctcaggagt

SEQ ID NO: 292843 - DNA, 20 bp, synthetic construct
  source 1..20: mol_type = other DNA
atattgcttgacctcaggag

SEQ ID NO: 292844 - DNA, 20 bp, synthetic construct
  source 1..20: mol_type = other DNA
catattgcttgacctcagga

SEQ ID NO: 292845 - DNA, 20 bp, synthetic construct
  source 1..20: mol_type = other DNA
gcatattgcttgacctcagg

SEQ ID NO: 292846 - DNA, 20 bp, synthetic construct
  source 1..20: mol_type = other DNA
ggcatattgcttgacctcag

SEQ ID NO: 292847 - DNA, 20 bp, synthetic construct
  source 1..20: mol_type = other DNA
gggcatattgcttgacctca

SEQ ID NO: 292848 - DNA, 20 bp, synthetic construct
  source 1..20: mol_type = other DNA
tgggcatattgcttgacctc

SEQ ID NO: 292849 - DNA, 20 bp, synthetic construct
  source 1..20: mol_type = other DNA
gtgggcatattgcttgacct

SEQ ID NO: 292850 - DNA, 20 bp, synthetic construct
  source 1..20: mol_type = other DNA
ggtgggcatattgcttgacc

SEQ ID NO: 292851 - DNA, 20 bp, synthetic construct
  source 1..20: mol_type = other DNA
aggtgggcatattgcttgac

SEQ ID NO: 292852 - DNA, 20 bp, synthetic construct
  source 1..20: mol_type = other DNA
gaggtgggcatattgcttga

SEQ ID NO: 292853 - DNA, 20 bp, synthetic construct
  source 1..20: mol_type = other DNA
cgaggtgggcatattgcttg

SEQ ID NO: 292854 - DNA, 20 bp, synthetic construct
  source 1..20: mol_type = other DNA
ccgaggtgggcatattgctt

SEQ ID NO: 292855 - DNA, 20 bp, synthetic construct
  source 1..20: mol_type = other DNA
gccgaggtgggcatattgct

SEQ ID NO: 292856 - DNA, 20 bp, synthetic construct
  source 1..20: mol_type = other DNA
ggccgaggtgggcatattgc

SEQ ID NO: 292857 - DNA, 20 bp, synthetic construct
  source 1..20: mol_type = other DNA
aggccgaggtgggcatattg

SEQ ID NO: 292858 - DNA, 20 bp, synthetic construct
  source 1..20: mol_type = other DNA
gaggccgaggtgggcatatt

SEQ ID NO: 292859 - DNA, 20 bp, synthetic construct
  source 1..20: mol_type = other DNA
ggaggccgaggtgggcatat

SEQ ID NO: 292860 - DNA, 20 bp, synthetic construct
  source 1..20: mol_type = other DNA
gggaggccgaggtgggcata

SEQ ID NO: 292861 - DNA, 20 bp, synthetic construct
  source 1..20: mol_type = other DNA
tgggaggccgaggtgggcat

SEQ ID NO: 292862 - DNA, 20 bp, synthetic construct
  source 1..20: mol_type = other DNA
ttgggaggccgaggtgggca

SEQ ID NO: 292863 - DNA, 20 bp, synthetic construct
  source 1..20: mol_type = other DNA
cttgggaggccgaggtgggc

SEQ ID NO: 292864 - DNA, 20 bp, synthetic construct
  source 1..20: mol_type = other DNA
ccttgggaggccgaggtggg

SEQ ID NO: 292865 - DNA, 20 bp, synthetic construct
  source 1..20: mol_type = other DNA
accttgggaggccgaggtgg

SEQ ID NO: 292866 - DNA, 20 bp, synthetic construct
  source 1..20: mol_type = other DNA
caccttgggaggccgaggtg

SEQ ID NO: 292867 - DNA, 20 bp, synthetic construct
  source 1..20: mol_type = other DNA
gcaccttgggaggccgaggt

SEQ ID NO: 292868 - DNA, 20 bp, synthetic construct
  source 1..20: mol_type = other DNA
agcaccttgggaggccgagg

SEQ ID NO: 292869 - DNA, 20 bp, synthetic construct
  source 1..20: mol_type = other DNA
cagcaccttgggaggccgag

SEQ ID NO: 292870 - DNA, 20 bp, synthetic construct
  source 1..20: mol_type = other DNA
ccagcaccttgggaggccga

SEQ ID NO: 292871 - DNA, 20 bp, synthetic construct
  source 1..20: mol_type = other DNA
cccagcaccttgggaggccg

SEQ ID NO: 292872 - DNA, 20 bp, synthetic construct
  source 1..20: mol_type = other DNA
tcccagcaccttgggaggcc

SEQ ID NO: 292873 - DNA, 20 bp, synthetic construct
  source 1..20: mol_type = other DNA
atcccagcaccttgggaggc

SEQ ID NO: 292874 - DNA, 20 bp, synthetic construct
  source 1..20: mol_type = other DNA
aatcccagcaccttgggagg

SEQ ID NO: 292875 - DNA, 20 bp, synthetic construct
  source 1..20: mol_type = other DNA
taatcccagcaccttgggag

SEQ ID NO: 292876 - DNA, 20 bp, synthetic construct
  source 1..20: mol_type = other DNA
gtaatcccagcaccttggga

SEQ ID NO: 292877 - DNA, 20 bp, synthetic construct
  source 1..20: mol_type = other DNA
tgtaatcccagcaccttggg

SEQ ID NO: 292878 - DNA, 20 bp, synthetic construct
  source 1..20: mol_type = other DNA
ctgtaatcccagcaccttgg

SEQ ID NO: 292879 - DNA, 20 bp, synthetic construct
  source 1..20: mol_type = other DNA
cctgtaatcccagcaccttg

SEQ ID NO: 292880 - DNA, 20 bp, synthetic construct
  source 1..20: mol_type = other DNA
acctgtaatcccagcacctt

SEQ ID NO: 292881 - DNA, 20 bp, synthetic construct
  source 1..20: mol_type = other DNA
cacctgtaatcccagcacct

SEQ ID NO: 292882 - DNA, 20 bp, synthetic construct
  source 1..20: mol_type = other DNA
acacctgtaatcccagcacc

SEQ ID NO: 292883 - DNA, 20 bp, synthetic construct
  source 1..20: mol_type = other DNA
cacacctgtaatcccagcac

SEQ ID NO: 292884 - DNA, 20 bp, synthetic construct
  source 1..20: mol_type = other DNA
tcacacctgtaatcccagca

SEQ ID NO: 292885 - DNA, 20 bp, synthetic construct
  source 1..20: mol_type = other DNA
ctcacacctgtaatcccagc

SEQ ID NO: 292886 - DNA, 20 bp, synthetic construct
  source 1..20: mol_type = other DNA
gctcacacctgtaatcccag

SEQ ID NO: 292887 - DNA, 20 bp, synthetic construct
  source 1..20: mol_type = other DNA
ggctcacacctgtaatccca

SEQ ID NO: 292888 - DNA, 20 bp, synthetic construct
  source 1..20: mol_type = other DNA
tggctcacacctgtaatccc

SEQ ID NO: 292889 - DNA, 20 bp, synthetic construct
  source 1..20: mol_type = other DNA
gtggctcacacctgtaatcc

SEQ ID NO: 292890 - DNA, 20 bp, synthetic construct
  source 1..20: mol_type = other DNA
tgtggctcacacctgtaatc

SEQ ID NO: 292891 - DNA, 20 bp, synthetic construct
  source 1..20: mol_type = other DNA
ctgtggctcacacctgtaat

SEQ ID NO: 292892 - DNA, 20 bp, synthetic construct
  source 1..20: mol_type = other DNA
actgtggctcacacctgtaa

SEQ ID NO: 292893 - DNA, 20 bp, synthetic construct
  source 1..20: mol_type = other DNA
cactgtggctcacacctgta

SEQ ID NO: 292894 - DNA, 20 bp, synthetic construct
  source 1..20: mol_type = other DNA
gcactgtggctcacacctgt

SEQ ID NO: 292895 - DNA, 20 bp, synthetic construct
  source 1..20: mol_type = other DNA
agcactgtggctcacacctg

SEQ ID NO: 292896 - DNA, 20 bp, synthetic construct
  source 1..20: mol_type = other DNA
gagcactgtggctcacacct

SEQ ID NO: 292897 - DNA, 20 bp, synthetic construct
  source 1..20: mol_type = other DNA
cgagcactgtggctcacacc

SEQ ID NO: 292898 - DNA, 20 bp, synthetic construct
  source 1..20: mol_type = other DNA
ccgagcactgtggctcacac

SEQ ID NO: 292899 - DNA, 20 bp, synthetic construct
  source 1..20: mol_type = other DNA
gccgagcactgtggctcaca

SEQ ID NO: 292900 - DNA, 20 bp, synthetic construct
  source 1..20: mol_type = other DNA
ggccgagcactgtggctcac

SEQ ID NO: 292901 - DNA, 20 bp, synthetic construct
  source 1..20: mol_type = other DNA
aggccgagcactgtggctca

SEQ ID NO: 292902 - DNA, 20 bp, synthetic construct
  source 1..20: mol_type = other DNA
taggccgagcactgtggctc

SEQ ID NO: 292903 - DNA, 20 bp, synthetic construct
  source 1..20: mol_type = other DNA
ttaggccgagcactgtggct

SEQ ID NO: 292904 - DNA, 20 bp, synthetic construct
  source 1..20: mol_type = other DNA
cttaggccgagcactgtggc

SEQ ID NO: 292905 - DNA, 20 bp, synthetic construct
  source 1..20: mol_type = other DNA
acttaggccgagcactgtgg

SEQ ID NO: 292906 - DNA, 20 bp, synthetic construct
  source 1..20: mol_type = other DNA
gacttaggccgagcactgtg

SEQ ID NO: 292907 - DNA, 20 bp, synthetic construct
  source 1..20: mol_type = other DNA
tgacttaggccgagcactgt

SEQ ID NO: 292908 - DNA, 20 bp, synthetic construct
  source 1..20: mol_type = other DNA
gtgacttaggccgagcactg

SEQ ID NO: 292909 - DNA, 20 bp, synthetic construct
  source 1..20: mol_type = other DNA
agtgacttaggccgagcact

SEQ ID NO: 292910 - DNA, 20 bp, synthetic construct
  source 1..20: mol_type = other DNA
cagtgacttaggccgagcac

SEQ ID NO: 292911 - DNA, 20 bp, synthetic construct
  source 1..20: mol_type = other DNA
gcagtgacttaggccgagca

SEQ ID NO: 292912 - DNA, 20 bp, synthetic construct
  source 1..20: mol_type = other DNA
tgcagtgacttaggccgagc

SEQ ID NO: 292913 - DNA, 20 bp, synthetic construct
  source 1..20: mol_type = other DNA
ctgcagtgacttaggccgag

SEQ ID NO: 292914 - DNA, 20 bp, synthetic construct
  source 1..20: mol_type = other DNA
actgcagtgacttaggccga

SEQ ID NO: 292915 - DNA, 20 bp, synthetic construct
  source 1..20: mol_type = other DNA
aactgcagtgacttaggccg

SEQ ID NO: 292916 - DNA, 20 bp, synthetic construct
  source 1..20: mol_type = other DNA
aaactgcagtgacttaggcc

SEQ ID NO: 292917 - DNA, 20 bp, synthetic construct
  source 1..20: mol_type = other DNA
aaaactgcagtgacttaggc

SEQ ID NO: 292918 - DNA, 20 bp, synthetic construct
  source 1..20: mol_type = other DNA
aaaaactgcagtgacttagg

SEQ ID NO: 292919 - DNA, 20 bp, synthetic construct
  source 1..20: mol_type = other DNA
taaaaactgcagtgacttag

SEQ ID NO: 292920 - DNA, 20 bp, synthetic construct
  source 1..20: mol_type = other DNA
ttaaaaactgcagtgactta

SEQ ID NO: 292921 - DNA, 20 bp, synthetic construct
  source 1..20: mol_type = other DNA
tttaaaaactgcagtgactt

SEQ ID NO: 292922 - DNA, 20 bp, synthetic construct
  source 1..20: mol_type = other DNA
ctttaaaaactgcagtgact

SEQ ID NO: 292923 - DNA, 20 bp, synthetic construct
  source 1..20: mol_type = other DNA
gctttaaaaactgcagtgac

SEQ ID NO: 292924 - DNA, 20 bp, synthetic construct
  source 1..20: mol_type = other DNA
agctttaaaaactgcagtga

SEQ ID NO: 292925 - DNA, 20 bp, synthetic construct
  source 1..20: mol_type = other DNA
gagctttaaaaactgcagtg

SEQ ID NO: 292926 - DNA, 20 bp, synthetic construct
  source 1..20: mol_type = other DNA
ggagctttaaaaactgcagt

SEQ ID NO: 292927 - DNA, 20 bp, synthetic construct
  source 1..20: mol_type = other DNA
gggagctttaaaaactgcag

SEQ ID NO: 292928 - DNA, 20 bp, synthetic construct
  source 1..20: mol_type = other DNA
tgggagctttaaaaactgca

SEQ ID NO: 292929 - DNA, 20 bp, synthetic construct
  source 1..20: mol_type = other DNA
ctgggagctttaaaaactgc

SEQ ID NO: 292930 - DNA, 20 bp, synthetic construct
  source 1..20: mol_type = other DNA
cctgggagctttaaaaactg

SEQ ID NO: 292931 - DNA, 20 bp, synthetic construct
  source 1..20: mol_type = other DNA
acctgggagctttaaaaact

SEQ ID NO: 292932 - DNA, 20 bp, synthetic construct
  source 1..20: mol_type = other DNA
cacctgggagctttaaaaac

SEQ ID NO: 292933 - DNA, 20 bp, synthetic construct
  source 1..20: mol_type = other DNA
tcacctgggagctttaaaaa

SEQ ID NO: 292934 - DNA, 20 bp, synthetic construct
  source 1..20: mol_type = other DNA
atcacctgggagctttaaaa

SEQ ID NO: 292935 - DNA, 20 bp, synthetic construct
  source 1..20: mol_type = other DNA
aatcacctgggagctttaaa

SEQ ID NO: 292936 - DNA, 20 bp, synthetic construct
  source 1..20: mol_type = other DNA
gaatcacctgggagctttaa

SEQ ID NO: 292937 - DNA, 20 bp, synthetic construct
  source 1..20: mol_type = other DNA
agaatcacctgggagcttta

SEQ ID NO: 292938 - DNA, 20 bp, synthetic construct
  source 1..20: mol_type = other DNA
aagaatcacctgggagcttt

SEQ ID NO: 292939 - DNA, 20 bp, synthetic construct
  source 1..20: mol_type = other DNA
gaagaatcacctgggagctt

SEQ ID NO: 292940 - DNA, 20 bp, synthetic construct
  source 1..20: mol_type = other DNA
tgaagaatcacctgggagct

SEQ ID NO: 292941 - DNA, 20 bp, synthetic construct
  source 1..20: mol_type = other DNA
ctgaagaatcacctgggagc

SEQ ID NO: 292942 - DNA, 20 bp, synthetic construct
  source 1..20: mol_type = other DNA
actgaagaatcacctgggag

SEQ ID NO: 292943 - DNA, 20 bp, synthetic construct
  source 1..20: mol_type = other DNA
cactgaagaatcacctggga

SEQ ID NO: 292944 - DNA, 20 bp, synthetic construct
  source 1..20: mol_type = other DNA
gcactgaagaatcacctggg

SEQ ID NO: 292945 - DNA, 20 bp, synthetic construct
  source 1..20: mol_type = other DNA
tgcactgaagaatcacctgg

SEQ ID NO: 292946 - DNA, 20 bp, synthetic construct
  source 1..20: mol_type = other DNA
ctgcactgaagaatcacctg

SEQ ID NO: 292947 - DNA, 20 bp, synthetic construct
  source 1..20: mol_type = other DNA
actgcactgaagaatcacct

SEQ ID NO: 292948 - DNA, 20 bp, synthetic construct
  source 1..20: mol_type = other DNA
gactgcactgaagaatcacc

SEQ ID NO: 292949 - DNA, 20 bp, synthetic construct
  source 1..20: mol_type = other DNA
tgactgcactgaagaatcac

SEQ ID NO: 292950 - DNA, 20 bp, synthetic construct
  source 1..20: mol_type = other DNA
ttgactgcactgaagaatca

SEQ ID NO: 292951 - DNA, 20 bp, synthetic construct
  source 1..20: mol_type = other DNA
tttgactgcactgaagaatc

SEQ ID NO: 292952 - DNA, 20 bp, synthetic construct
  source 1..20: mol_type = other DNA
ttttgactgcactgaagaat

SEQ ID NO: 292953 - DNA, 20 bp, synthetic construct
  source 1..20: mol_type = other DNA
cttttgactgcactgaagaa

SEQ ID NO: 292954 - DNA, 20 bp, synthetic construct
  source 1..20: mol_type = other DNA
acttttgactgcactgaaga

SEQ ID NO: 292955 - DNA, 20 bp, synthetic construct
  source 1..20: mol_type = other DNA
cacttttgactgcactgaag

SEQ ID NO: 292956 - DNA, 20 bp, synthetic construct
  source 1..20: mol_type = other DNA
tcacttttgactgcactgaa

SEQ ID NO: 292957 - DNA, 20 bp, synthetic construct
  source 1..20: mol_type = other DNA
ctcacttttgactgcactga

SEQ ID NO: 292958 - DNA, 20 bp, synthetic construct
  source 1..20: mol_type = other DNA
tctcacttttgactgcactg

SEQ ID NO: 292959 - DNA, 20 bp, synthetic construct
  source 1..20: mol_type = other DNA
ttctcacttttgactgcact

SEQ ID NO: 292960 - DNA, 20 bp, synthetic construct
  source 1..20: mol_type = other DNA
gttctcacttttgactgcac

SEQ ID NO: 292961 - DNA, 20 bp, synthetic construct
  source 1..20: mol_type = other DNA
agttctcacttttgactgca

SEQ ID NO: 292962 - DNA, 20 bp, synthetic construct
  source 1..20: mol_type = other DNA
cagttctcacttttgactgc

SEQ ID NO: 292963 - DNA, 20 bp, synthetic construct
  source 1..20: mol_type = other DNA
ccagttctcacttttgactg

SEQ ID NO: 292964 - DNA, 20 bp, synthetic construct
  source 1..20: mol_type = other DNA
gccagttctcacttttgact

SEQ ID NO: 292965 - DNA, 20 bp, synthetic construct
  source 1..20: mol_type = other DNA
agccagttctcacttttgac

SEQ ID NO: 292966 - DNA, 20 bp, synthetic construct
  source 1..20: mol_type = other DNA
cagccagttctcacttttga

SEQ ID NO: 292967 - DNA, 20 bp, synthetic construct
  source 1..20: mol_type = other DNA
ccagccagttctcacttttg

SEQ ID NO: 292968 - DNA, 20 bp, synthetic construct
  source 1..20: mol_type = other DNA
cccagccagttctcactttt

SEQ ID NO: 292969 - DNA, 20 bp, synthetic construct
  source 1..20: mol_type = other DNA
acccagccagttctcacttt

SEQ ID NO: 292970 - DNA, 20 bp, synthetic construct
  source 1..20: mol_type = other DNA
cacccagccagttctcactt

SEQ ID NO: 292971 - DNA, 20 bp, synthetic construct
  source 1..20: mol_type = other DNA
gcacccagccagttctcact

SEQ ID NO: 292972 - DNA, 20 bp, synthetic construct
  source 1..20: mol_type = other DNA
cgcacccagccagttctcac

SEQ ID NO: 292973 - DNA, 20 bp, synthetic construct
  source 1..20: mol_type = other DNA
ccgcacccagccagttctca

SEQ ID NO: 292974 - DNA, 20 bp, synthetic construct
  source 1..20: mol_type = other DNA
accgcacccagccagttctc

SEQ ID NO: 292975 - DNA, 20 bp, synthetic construct
  source 1..20: mol_type = other DNA
caccgcacccagccagttct

SEQ ID NO: 292976 - DNA, 20 bp, synthetic construct
  source 1..20: mol_type = other DNA
ccaccgcacccagccagttc

SEQ ID NO: 292977 - DNA, 20 bp, synthetic construct
  source 1..20: mol_type = other DNA
gccaccgcacccagccagtt

SEQ ID NO: 292978 - DNA, 20 bp, synthetic construct
  source 1..20: mol_type = other DNA
agccaccgcacccagccagt

SEQ ID NO: 292979 - DNA, 20 bp, synthetic construct
  source 1..20: mol_type = other DNA
gagccaccgcacccagccag

SEQ ID NO: 292980 - DNA, 20 bp, synthetic construct
  source 1..20: mol_type = other DNA
tgagccaccgcacccagcca

SEQ ID NO: 292981 - DNA, 20 bp, synthetic construct
  source 1..20: mol_type = other DNA
atgagccaccgcacccagcc

SEQ ID NO: 292982 - DNA, 20 bp, synthetic construct
  source 1..20: mol_type = other DNA
catgagccaccgcacccagc

SEQ ID NO: 292983 - DNA, 20 bp, synthetic construct
  source 1..20: mol_type = other DNA
gcatgagccaccgcacccag

SEQ ID NO: 292984 - DNA, 20 bp, synthetic construct
  source 1..20: mol_type = other DNA
ggcatgagccaccgcaccca

SEQ ID NO: 292985 - DNA, 20 bp, synthetic construct
  source 1..20: mol_type = other DNA
aggcatgagccaccgcaccc

SEQ ID NO: 292986 - DNA, 20 bp, synthetic construct
  source 1..20: mol_type = other DNA
caggcatgagccaccgcacc

SEQ ID NO: 292987 - DNA, 20 bp, synthetic construct
  source 1..20: mol_type = other DNA
acaggcatgagccaccgcac

SEQ ID NO: 292988 - DNA, 20 bp, synthetic construct
  source 1..20: mol_type = other DNA
tacaggcatgagccaccgca

SEQ ID NO: 292989 - DNA, 20 bp, synthetic construct
  source 1..20: mol_type = other DNA
ttacaggcatgagccaccgc

SEQ ID NO: 292990 - DNA, 20 bp, synthetic construct
  source 1..20: mol_type = other DNA
attacaggcatgagccaccg

SEQ ID NO: 292991 - DNA, 20 bp, synthetic construct
  source 1..20: mol_type = other DNA
gattacaggcatgagccacc

SEQ ID NO: 292992 - DNA, 20 bp, synthetic construct
  source 1..20: mol_type = other DNA
ggattacaggcatgagccac

SEQ ID NO: 292993 - DNA, 20 bp, synthetic construct
  source 1..20: mol_type = other DNA
gggattacaggcatgagcca

SEQ ID NO: 292994 - DNA, 20 bp, synthetic construct
  source 1..20: mol_type = other DNA
tgggattacaggcatgagcc

SEQ ID NO: 292995 - DNA, 20 bp, synthetic construct
  source 1..20: mol_type = other DNA
ctgggattacaggcatgagc

SEQ ID NO: 292996 - DNA, 20 bp, synthetic construct
  source 1..20: mol_type = other DNA
gctgggattacaggcatgag

SEQ ID NO: 292997 - DNA, 20 bp, synthetic construct
  source 1..20: mol_type = other DNA
tgctgggattacaggcatga

SEQ ID NO: 292998 - DNA, 20 bp, synthetic construct
  source 1..20: mol_type = other DNA
gtgctgggattacaggcatg

SEQ ID NO: 292999 - DNA, 20 bp, synthetic construct
  source 1..20: mol_type = other DNA
ggtgctgggattacaggcat

SEQ ID NO: 293000 - DNA, 20 bp, synthetic construct
  source 1..20: mol_type = other DNA
aggtgctgggattacaggca

SEQ ID NO: 293001 - DNA, 20 bp, synthetic construct
  source 1..20: mol_type = other DNA
aaggtgctgggattacaggc

SEQ ID NO: 293002 - DNA, 20 bp, synthetic construct
  source 1..20: mol_type = other DNA
caaggtgctgggattacagg

SEQ ID NO: 293003 - DNA, 20 bp, synthetic construct
  source 1..20: mol_type = other DNA
ccaaggtgctgggattacag

SEQ ID NO: 293004 - DNA, 20 bp, synthetic construct
  source 1..20: mol_type = other DNA
cccaaggtgctgggattaca

SEQ ID NO: 293005 - DNA, 20 bp, synthetic construct
  source 1..20: mol_type = other DNA
tcccaaggtgctgggattac

SEQ ID NO: 293006 - DNA, 20 bp, synthetic construct
  source 1..20: mol_type = other DNA
ctcccaaggtgctgggatta

SEQ ID NO: 293007 - DNA, 20 bp, synthetic construct
  source 1..20: mol_type = other DNA
cctcccaaggtgctgggatt

SEQ ID NO: 293008 - DNA, 20 bp, synthetic construct
  source 1..20: mol_type = other DNA
gcctcccaaggtgctgggat

SEQ ID NO: 293009 - DNA, 20 bp, synthetic construct
  source 1..20: mol_type = other DNA
cgcctcccaaggtgctggga

SEQ ID NO: 293010 - DNA, 20 bp, synthetic construct
  source 1..20: mol_type = other DNA
tcgcctcccaaggtgctggg

SEQ ID NO: 293011 - DNA, 20 bp, synthetic construct
  source 1..20: mol_type = other DNA
ttcgcctcccaaggtgctgg

SEQ ID NO: 293012 - DNA, 20 bp, synthetic construct
  source 1..20: mol_type = other DNA
cttcgcctcccaaggtgctg

SEQ ID NO: 293013 - DNA, 20 bp, synthetic construct
  source 1..20: mol_type = other DNA
ccttcgcctcccaaggtgct

SEQ ID NO: 293014 - DNA, 20 bp, synthetic construct
  source 1..20: mol_type = other DNA
accttcgcctcccaaggtgc

SEQ ID NO: 293015 - DNA, 20 bp, synthetic construct
  source 1..20: mol_type = other DNA
caccttcgcctcccaaggtg

SEQ ID NO: 293016 - DNA, 20 bp, synthetic construct
  source 1..20: mol_type = other DNA
ccaccttcgcctcccaaggt

SEQ ID NO: 293017 - DNA, 20 bp, synthetic construct
  source 1..20: mol_type = other DNA
cccaccttcgcctcccaagg

SEQ ID NO: 293018 - DNA, 20 bp, synthetic construct
  source 1..20: mol_type = other DNA
gcccaccttcgcctcccaag

SEQ ID NO: 293019 - DNA, 20 bp, synthetic construct
  source 1..20: mol_type = other DNA
tgcccaccttcgcctcccaa

SEQ ID NO: 293020 - DNA, 20 bp, synthetic construct
  source 1..20: mol_type = other DNA
ctgcccaccttcgcctccca

SEQ ID NO: 293021 - DNA, 20 bp, synthetic construct
  source 1..20: mol_type = other DNA
tctgcccaccttcgcctccc

SEQ ID NO: 293022 - DNA, 20 bp, synthetic construct
  source 1..20: mol_type = other DNA
atctgcccaccttcgcctcc

SEQ ID NO: 293023 - DNA, 20 bp, synthetic construct
  source 1..20: mol_type = other DNA
catctgcccaccttcgcctc

SEQ ID NO: 293024 - DNA, 20 bp, synthetic construct
  source 1..20: mol_type = other DNA
ccatctgcccaccttcgcct

SEQ ID NO: 293025 - DNA, 20 bp, synthetic construct
  source 1..20: mol_type = other DNA
gccatctgcccaccttcgcc

SEQ ID NO: 293026 - DNA, 20 bp, synthetic construct
  source 1..20: mol_type = other DNA
agccatctgcccaccttcgc

SEQ ID NO: 293027 - DNA, 20 bp, synthetic construct
  source 1..20: mol_type = other DNA
aagccatctgcccaccttcg

SEQ ID NO: 293028 - DNA, 20 bp, synthetic construct
  source 1..20: mol_type = other DNA
caagccatctgcccaccttc

SEQ ID NO: 293029 - DNA, 20 bp, synthetic construct
  source 1..20: mol_type = other DNA
tcaagccatctgcccacctt

SEQ ID NO: 293030 - DNA, 20 bp, synthetic construct
  source 1..20: mol_type = other DNA
ctcaagccatctgcccacct

SEQ ID NO: 293031 - DNA, 20 bp, synthetic construct
  source 1..20: mol_type = other DNA
cctcaagccatctgcccacc

SEQ ID NO: 293032 - DNA, 20 bp, synthetic construct
  source 1..20: mol_type = other DNA
acctcaagccatctgcccac

SEQ ID NO: 293033 - DNA, 20 bp, synthetic construct
  source 1..20: mol_type = other DNA
gacctcaagccatctgccca

SEQ ID NO: 293034 - DNA, 20 bp, synthetic construct
  source 1..20: mol_type = other DNA
tgacctcaagccatctgccc

SEQ ID NO: 293035 - DNA, 20 bp, synthetic construct
  source 1..20: mol_type = other DNA
ctgacctcaagccatctgcc

SEQ ID NO: 293036 - DNA, 20 bp, synthetic construct
  source 1..20: mol_type = other DNA
cctgacctcaagccatctgc

SEQ ID NO: 293037 - DNA, 20 bp, synthetic construct
  source 1..20: mol_type = other DNA
tcctgacctcaagccatctg

SEQ ID NO: 293038 - DNA, 20 bp, synthetic construct
  source 1..20: mol_type = other DNA
ctcctgacctcaagccatct

SEQ ID NO: 293039 - DNA, 20 bp, synthetic construct
  source 1..20: mol_type = other DNA
actcctgacctcaagccatc

SEQ ID NO: 293040 - DNA, 20 bp, synthetic construct
  source 1..20: mol_type = other DNA
aactcctgacctcaagccat

SEQ ID NO: 293041 - DNA, 20 bp, synthetic construct
  source 1..20: mol_type = other DNA
gaactcctgacctcaagcca

SEQ ID NO: 293042 - DNA, 20 bp, synthetic construct
  source 1..20: mol_type = other DNA
tgaactcctgacctcaagcc

SEQ ID NO: 293043 - DNA, 20 bp, synthetic construct
  source 1..20: mol_type = other DNA
ttgaactcctgacctcaagc

SEQ ID NO: 293044 - DNA, 20 bp, synthetic construct
  source 1..20: mol_type = other DNA
cttgaactcctgacctcaag

SEQ ID NO: 293045 - DNA, 20 bp, synthetic construct
  source 1..20: mol_type = other DNA
tcttgaactcctgacctcaa

SEQ ID NO: 293046 - DNA, 20 bp, synthetic construct
  source 1..20: mol_type = other DNA
gtcttgaactcctgacctca

SEQ ID NO: 293047 - DNA, 20 bp, synthetic construct
  source 1..20: mol_type = other DNA
ggtcttgaactcctgacctc

SEQ ID NO: 293048 - DNA, 20 bp, synthetic construct
  source 1..20: mol_type = other DNA
tggtcttgaactcctgacct

SEQ ID NO: 293049 - DNA, 20 bp, synthetic construct
  source 1..20: mol_type = other DNA
ctggtcttgaactcctgacc

SEQ ID NO: 293050 - DNA, 20 bp, synthetic construct
  source 1..20: mol_type = other DNA
gctggtcttgaactcctgac

SEQ ID NO: 293051 - DNA, 20 bp, synthetic construct
  source 1..20: mol_type = other DNA
ggctggtcttgaactcctga

SEQ ID NO: 293052 - DNA, 20 bp, synthetic construct
  source 1..20: mol_type = other DNA
aggctggtcttgaactcctg

SEQ ID NO: 293053 - DNA, 20 bp, synthetic construct
  source 1..20: mol_type = other DNA
caggctggtcttgaactcct

SEQ ID NO: 293054 - DNA, 20 bp, synthetic construct
  source 1..20: mol_type = other DNA
ccaggctggtcttgaactcc

SEQ ID NO: 293055 - DNA, 20 bp, synthetic construct
  source 1..20: mol_type = other DNA
gccaggctggtcttgaactc

SEQ ID NO: 293056 - DNA, 20 bp, synthetic construct
  source 1..20: mol_type = other DNA
ggccaggctggtcttgaact

SEQ ID NO: 293057 - DNA, 20 bp, synthetic construct
  source 1..20: mol_type = other DNA
tggccaggctggtcttgaac

SEQ ID NO: 293058 - DNA, 20 bp, synthetic construct
  source 1..20: mol_type = other DNA
ttggccaggctggtcttgaa

SEQ ID NO: 293059 - DNA, 20 bp, synthetic construct
  source 1..20: mol_type = other DNA
gttggccaggctggtcttga

SEQ ID NO: 293060 - DNA, 20 bp, synthetic construct
  source 1..20: mol_type = other DNA
tgttggccaggctggtcttg

SEQ ID NO: 293061 - DNA, 20 bp, synthetic construct
  source 1..20: mol_type = other DNA
atgttggccaggctggtctt

SEQ ID NO: 293062 - DNA, 20 bp, synthetic construct
  source 1..20: mol_type = other DNA
catgttggccaggctggtct

SEQ ID NO: 293063 - DNA, 20 bp, synthetic construct
  source 1..20: mol_type = other DNA
ccatgttggccaggctggtc

SEQ ID NO: 293064 - DNA, 20 bp, synthetic construct
  source 1..20: mol_type = other DNA
accatgttggccaggctggt

SEQ ID NO: 293065 - DNA, 20 bp, synthetic construct
  source 1..20: mol_type = other DNA
taccatgttggccaggctgg

SEQ ID NO: 293066 - DNA, 20 bp, synthetic construct
  source 1..20: mol_type = other DNA
ttaccatgttggccaggctg

SEQ ID NO: 293067 - DNA, 20 bp, synthetic construct
  source 1..20: mol_type = other DNA
tttaccatgttggccaggct

SEQ ID NO: 293068 - DNA, 20 bp, synthetic construct
  source 1..20: mol_type = other DNA
ttttaccatgttggccaggc

SEQ ID NO: 293069 - DNA, 20 bp, synthetic construct
  source 1..20: mol_type = other DNA
gttttaccatgttggccagg

SEQ ID NO: 293070 - DNA, 20 bp, synthetic construct
  source 1..20: mol_type = other DNA
ggttttaccatgttggccag

SEQ ID NO: 293071 - DNA, 20 bp, synthetic construct
  source 1..20: mol_type = other DNA
gggttttaccatgttggcca

SEQ ID NO: 293072 - DNA, 20 bp, synthetic construct
  source 1..20: mol_type = other DNA
ggggttttaccatgttggcc

SEQ ID NO: 293073 - DNA, 20 bp, synthetic construct
  source 1..20: mol_type = other DNA
tggggttttaccatgttggc

SEQ ID NO: 293074 - DNA, 20 bp, synthetic construct
  source 1..20: mol_type = other DNA
atggggttttaccatgttgg

SEQ ID NO: 293075 - DNA, 20 bp, synthetic construct
  source 1..20: mol_type = other DNA
gatggggttttaccatgttg

SEQ ID NO: 293076 - DNA, 20 bp, synthetic construct
  source 1..20: mol_type = other DNA
agatggggttttaccatgtt

SEQ ID NO: 293077 - DNA, 20 bp, synthetic construct
  source 1..20: mol_type = other DNA
gagatggggttttaccatgt

SEQ ID NO: 293078 - DNA, 20 bp, synthetic construct
  source 1..20: mol_type = other DNA
agagatggggttttaccatg

SEQ ID NO: 293079 - DNA, 20 bp, synthetic construct
  source 1..20: mol_type = other DNA
tagagatggggttttaccat

SEQ ID NO: 293080 - DNA, 20 bp, synthetic construct
  source 1..20: mol_type = other DNA
gtagagatggggttttacca

SEQ ID NO: 293081 - DNA, 20 bp, synthetic construct
  source 1..20: mol_type = other DNA
agtagagatggggttttacc

SEQ ID NO: 293082 - DNA, 20 bp, synthetic construct
  source 1..20: mol_type = other DNA
tagtagagatggggttttac

SEQ ID NO: 293083 - DNA, 20 bp, synthetic construct
  source 1..20: mol_type = other DNA
ttagtagagatggggtttta

SEQ ID NO: 293084 - DNA, 20 bp, synthetic construct
  source 1..20: mol_type = other DNA
tttagtagagatggggtttt

SEQ ID NO: 293085 - DNA, 20 bp, synthetic construct
  source 1..20: mol_type = other DNA
ttttagtagagatggggttt

SEQ ID NO: 293086 - DNA, 20 bp, synthetic construct
  source 1..20: mol_type = other DNA
tttttagtagagatggggtt

SEQ ID NO: 293087 - DNA, 20 bp, synthetic construct
  source 1..20: mol_type = other DNA
atttttagtagagatggggt

SEQ ID NO: 293088 - DNA, 20 bp, synthetic construct
  source 1..20: mol_type = other DNA
tatttttagtagagatgggg

SEQ ID NO: 293089 - DNA, 20 bp, synthetic construct
  source 1..20: mol_type = other DNA
gtatttttagtagagatggg

SEQ ID NO: 293090 - DNA, 20 bp, synthetic construct
  source 1..20: mol_type = other DNA
tgtatttttagtagagatgg

SEQ ID NO: 293091 - DNA, 20 bp, synthetic construct
  source 1..20: mol_type = other DNA
ttgtatttttagtagagatg

SEQ ID NO: 293092 - DNA, 20 bp, synthetic construct
  source 1..20: mol_type = other DNA
tttgtatttttagtagagat

SEQ ID NO: 293093 - DNA, 20 bp, synthetic construct
  source 1..20: mol_type = other DNA
ttttgtatttttagtagaga

SEQ ID NO: 293094 - DNA, 20 bp, synthetic construct
  source 1..20: mol_type = other DNA
cttttgtatttttagtagag

SEQ ID NO: 293095 - DNA, 20 bp, synthetic construct
  source 1..20: mol_type = other DNA
acttttgtatttttagtaga

SEQ ID NO: 293096 - DNA, 20 bp, synthetic construct
  source 1..20: mol_type = other DNA
aacttttgtatttttagtag

SEQ ID NO: 293097 - DNA, 20 bp, synthetic construct
  source 1..20: mol_type = other DNA
taacttttgtatttttagta

SEQ ID NO: 293098 - DNA, 20 bp, synthetic construct
  source 1..20: mol_type = other DNA
ctaacttttgtatttttagt

SEQ ID NO: 293099 - DNA, 20 bp, synthetic construct
  source 1..20: mol_type = other DNA
gctaacttttgtatttttag

SEQ ID NO: 293100 - DNA, 20 bp, synthetic construct
  source 1..20: mol_type = other DNA
agctaacttttgtattttta

SEQ ID NO: 293101 - DNA, 20 bp, synthetic construct
  source 1..20: mol_type = other DNA
cagctaacttttgtattttt

SEQ ID NO: 293102 - DNA, 20 bp, synthetic construct
  source 1..20: mol_type = other DNA
ccagctaacttttgtatttt

SEQ ID NO: 293103 - DNA, 20 bp, synthetic construct
  source 1..20: mol_type = other DNA
cccagctaacttttgtattt

SEQ ID NO: 293104 - DNA, 20 bp, synthetic construct
  source 1..20: mol_type = other DNA
acccagctaacttttgtatt

SEQ ID NO: 293105 - DNA, 20 bp, synthetic construct
  source 1..20: mol_type = other DNA
cacccagctaacttttgtat

SEQ ID NO: 293106 - DNA, 20 bp, synthetic construct
  source 1..20: mol_type = other DNA
acacccagctaacttttgta

SEQ ID NO: 293107 - DNA, 20 bp, synthetic construct
  source 1..20: mol_type = other DNA
cacacccagctaacttttgt

SEQ ID NO: 293108 - DNA, 20 bp, synthetic construct
  source 1..20: mol_type = other DNA
ccacacccagctaacttttg

SEQ ID NO: 293109 - DNA, 20 bp, synthetic construct
  source 1..20: mol_type = other DNA
accacacccagctaactttt

SEQ ID NO: 293110 - DNA, 20 bp, synthetic construct
  source 1..20: mol_type = other DNA
caccacacccagctaacttt

SEQ ID NO: 293111 - DNA, 20 bp, synthetic construct
  source 1..20: mol_type = other DNA
ccaccacacccagctaactt

SEQ ID NO: 293112 - DNA, 20 bp, synthetic construct
  source 1..20: mol_type = other DNA
accaccacacccagctaact

SEQ ID NO: 293113 - DNA, 20 bp, synthetic construct
  source 1..20: mol_type = other DNA
caccaccacacccagctaac

SEQ ID NO: 293114 - DNA, 20 bp, synthetic construct
  source 1..20: mol_type = other DNA
gcaccaccacacccagctaa

SEQ ID NO: 293115 - DNA, 20 bp, synthetic construct
  source 1..20: mol_type = other DNA
cgcaccaccacacccagcta

SEQ ID NO: 293116 - DNA, 20 bp, synthetic construct
  source 1..20: mol_type = other DNA
acgcaccaccacacccagct

SEQ ID NO: 293117 - DNA, 20 bp, synthetic construct
  source 1..20: mol_type = other DNA
cacgcaccaccacacccagc

SEQ ID NO: 293118 - DNA, 20 bp, synthetic construct
  source 1..20: mol_type = other DNA
gcacgcaccaccacacccag

SEQ ID NO: 293119 - DNA, 20 bp, synthetic construct
  source 1..20: mol_type = other DNA
ggcacgcaccaccacaccca

SEQ ID NO: 293120 - DNA, 20 bp, synthetic construct
  source 1..20: mol_type = other DNA
aggcacgcaccaccacaccc

SEQ ID NO: 293121 - DNA, 20 bp, synthetic construct
  source 1..20: mol_type = other DNA
caggcacgcaccaccacacc

SEQ ID NO: 293122 - DNA, 20 bp, synthetic construct
  source 1..20: mol_type = other DNA
acaggcacgcaccaccacac

SEQ ID NO: 293123 - DNA, 20 bp, synthetic construct
  source 1..20: mol_type = other DNA
tacaggcacgcaccaccaca

SEQ ID NO: 293124 - DNA, 20 bp, synthetic construct
  source 1..20: mol_type = other DNA
ttacaggcacgcaccaccac

SEQ ID NO: 293125 - DNA, 20 bp, synthetic construct
  source 1..20: mol_type = other DNA
attacaggcacgcaccacca

SEQ ID NO: 293126 - DNA, 20 bp, synthetic construct
  source 1..20: mol_type = other DNA
gattacaggcacgcaccacc

SEQ ID NO: 293127 - DNA, 20 bp, synthetic construct
  source 1..20: mol_type = other DNA
ggattacaggcacgcaccac

SEQ ID NO: 293128 - DNA, 20 bp, synthetic construct
  source 1..20: mol_type = other DNA
gggattacaggcacgcacca

SEQ ID NO: 293129 - DNA, 20 bp, synthetic construct
  source 1..20: mol_type = other DNA
tgggattacaggcacgcacc

SEQ ID NO: 293130 - DNA, 20 bp, synthetic construct
  source 1..20: mol_type = other DNA
ctgggattacaggcacgcac

SEQ ID NO: 293131 - DNA, 20 bp, synthetic construct
  source 1..20: mol_type = other DNA
gctgggattacaggcacgca

SEQ ID NO: 293132 - DNA, 20 bp, synthetic construct
  source 1..20: mol_type = other DNA
agctgggattacaggcacgc

SEQ ID NO: 293133 - DNA, 20 bp, synthetic construct
  source 1..20: mol_type = other DNA
tagctgggattacaggcacg

SEQ ID NO: 293134 - DNA, 20 bp, synthetic construct
  source 1..20: mol_type = other DNA
gtagctgggattacaggcac

SEQ ID NO: 293135 - DNA, 20 bp, synthetic construct
  source 1..20: mol_type = other DNA
agtagctgggattacaggca

SEQ ID NO: 293136 - DNA, 20 bp, synthetic construct
  source 1..20: mol_type = other DNA
aagtagctgggattacaggc

SEQ ID NO: 293137 - DNA, 20 bp, synthetic construct
  source 1..20: mol_type = other DNA
caagtagctgggattacagg

SEQ ID NO: 293138 - DNA, 20 bp, synthetic construct
  source 1..20: mol_type = other DNA
ccaagtagctgggattacag

SEQ ID NO: 293139 - DNA, 20 bp, synthetic construct
  source 1..20: mol_type = other DNA
cccaagtagctgggattaca

SEQ ID NO: 293140 - DNA, 20 bp, synthetic construct
  source 1..20: mol_type = other DNA
tcccaagtagctgggattac

SEQ ID NO: 293141 - DNA, 20 bp, synthetic construct
  source 1..20: mol_type = other DNA
ctcccaagtagctgggatta

SEQ ID NO: 293142 - DNA, 20 bp, synthetic construct
  source 1..20: mol_type = other DNA
cctcccaagtagctgggatt

SEQ ID NO: 293143 - DNA, 20 bp, synthetic construct
  source 1..20: mol_type = other DNA
gcctcccaagtagctgggat

SEQ ID NO: 293144 - DNA, 20 bp, synthetic construct
  source 1..20: mol_type = other DNA
agcctcccaagtagctggga

SEQ ID NO: 293145 - DNA, 20 bp, synthetic construct
  source 1..20: mol_type = other DNA
cagcctcccaagtagctggg

SEQ ID NO: 293146 - DNA, 20 bp, synthetic construct
  source 1..20: mol_type = other DNA
tcagcctcccaagtagctgg

SEQ ID NO: 293147 - DNA, 20 bp, synthetic construct
  source 1..20: mol_type = other DNA
ctcagcctcccaagtagctg

SEQ ID NO: 293148 - DNA, 20 bp, synthetic construct
  source 1..20: mol_type = other DNA
cctcagcctcccaagtagct

SEQ ID NO: 293149 - DNA, 20 bp, synthetic construct
  source 1..20: mol_type = other DNA
gcctcagcctcccaagtagc

SEQ ID NO: 293150 - DNA, 20 bp, synthetic construct
  source 1..20: mol_type = other DNA
tgcctcagcctcccaagtag

SEQ ID NO: 293151 - DNA, 20 bp, synthetic construct
  source 1..20: mol_type = other DNA
atgcctcagcctcccaagta

SEQ ID NO: 293152 - DNA, 20 bp, synthetic construct
  source 1..20: mol_type = other DNA
catgcctcagcctcccaagt

SEQ ID NO: 293153 - DNA, 20 bp, synthetic construct
  source 1..20: mol_type = other DNA
tcatgcctcagcctcccaag

SEQ ID NO: 293154 - DNA, 20 bp, synthetic construct
  source 1..20: mol_type = other DNA
ctcatgcctcagcctcccaa

SEQ ID NO: 293155 - DNA, 20 bp, synthetic construct
  source 1..20: mol_type = other DNA
tctcatgcctcagcctccca

SEQ ID NO: 293156 - DNA, 20 bp, synthetic construct
  source 1..20: mol_type = other DNA
ttctcatgcctcagcctccc

SEQ ID NO: 293157 - DNA, 20 bp, synthetic construct
  source 1..20: mol_type = other DNA
attctcatgcctcagcctcc

SEQ ID NO: 293158 - DNA, 20 bp, synthetic construct
  source 1..20: mol_type = other DNA
aattctcatgcctcagcctc

SEQ ID NO: 293159 - DNA, 20 bp, synthetic construct
  source 1..20: mol_type = other DNA
caattctcatgcctcagcct

SEQ ID NO: 293160 - DNA, 20 bp, synthetic construct
  source 1..20: mol_type = other DNA
gcaattctcatgcctcagcc

SEQ ID NO: 293161 - DNA, 20 bp, synthetic construct
  source 1..20: mol_type = other DNA
agcaattctcatgcctcagc

SEQ ID NO: 293162 - DNA, 20 bp, synthetic construct
  source 1..20: mol_type = other DNA
aagcaattctcatgcctcag

SEQ ID NO: 293163 - DNA, 20 bp, synthetic construct
  source 1..20: mol_type = other DNA
caagcaattctcatgcctca

SEQ ID NO: 293164 - DNA, 20 bp, synthetic construct
  source 1..20: mol_type = other DNA
tcaagcaattctcatgcctc

SEQ ID NO: 293165 - DNA, 20 bp, synthetic construct
  source 1..20: mol_type = other DNA
ttcaagcaattctcatgcct

SEQ ID NO: 293166 - DNA, 20 bp, synthetic construct
  source 1..20: mol_type = other DNA
gttcaagcaattctcatgcc

SEQ ID NO: 293167 - DNA, 20 bp, synthetic construct
  source 1..20: mol_type = other DNA
ggttcaagcaattctcatgc

SEQ ID NO: 293168 - DNA, 20 bp, synthetic construct
  source 1..20: mol_type = other DNA
gggttcaagcaattctcatg

SEQ ID NO: 293169 - DNA, 20 bp, synthetic construct
  source 1..20: mol_type = other DNA
tgggttcaagcaattctcat

SEQ ID NO: 293170 - DNA, 20 bp, synthetic construct
  source 1..20: mol_type = other DNA
ctgggttcaagcaattctca

SEQ ID NO: 293171 - DNA, 20 bp, synthetic construct
  source 1..20: mol_type = other DNA
cctgggttcaagcaattctc

SEQ ID NO: 293172 - DNA, 20 bp, synthetic construct
  source 1..20: mol_type = other DNA
ccctgggttcaagcaattct

SEQ ID NO: 293173 - DNA, 20 bp, synthetic construct
  source 1..20: mol_type = other DNA
cccctgggttcaagcaattc

SEQ ID NO: 293174 - DNA, 20 bp, synthetic construct
  source 1..20: mol_type = other DNA
tcccctgggttcaagcaatt

SEQ ID NO: 293175 - DNA, 20 bp, synthetic construct
  source 1..20: mol_type = other DNA
gtcccctgggttcaagcaat

SEQ ID NO: 293176 - DNA, 20 bp, synthetic construct
  source 1..20: mol_type = other DNA
tgtcccctgggttcaagcaa

SEQ ID NO: 293177 - DNA, 20 bp, synthetic construct
  source 1..20: mol_type = other DNA
ctgtcccctgggttcaagca

SEQ ID NO: 293178 - DNA, 20 bp, synthetic construct
  source 1..20: mol_type = other DNA
tctgtcccctgggttcaagc

SEQ ID NO: 293179 - DNA, 20 bp, synthetic construct
  source 1..20: mol_type = other DNA
ctctgtcccctgggttcaag

SEQ ID NO: 293180 - DNA, 20 bp, synthetic construct
  source 1..20: mol_type = other DNA
cctctgtcccctgggttcaa

SEQ ID NO: 293181 - DNA, 20 bp, synthetic construct
  source 1..20: mol_type = other DNA
acctctgtcccctgggttca

SEQ ID NO: 293182 - DNA, 20 bp, synthetic construct
  source 1..20: mol_type = other DNA
aacctctgtcccctgggttc

SEQ ID NO: 293183 - DNA, 20 bp, synthetic construct
  source 1..20: mol_type = other DNA
caacctctgtcccctgggtt

SEQ ID NO: 293184 - DNA, 20 bp, synthetic construct
  source 1..20: mol_type = other DNA
acaacctctgtcccctgggt

SEQ ID NO: 293185 - DNA, 20 bp, synthetic construct
  source 1..20: mol_type = other DNA
tacaacctctgtcccctggg

SEQ ID NO: 293186 - DNA, 20 bp, synthetic construct
  source 1..20: mol_type = other DNA
ctacaacctctgtcccctgg

SEQ ID NO: 293187 - DNA, 20 bp, synthetic construct
  source 1..20: mol_type = other DNA
actacaacctctgtcccctg

SEQ ID NO: 293188 - DNA, 20 bp, synthetic construct
  source 1..20: mol_type = other DNA
cactacaacctctgtcccct

SEQ ID NO: 293189 - DNA, 20 bp, synthetic construct
  source 1..20: mol_type = other DNA
tcactacaacctctgtcccc

SEQ ID NO: 293190 - DNA, 20 bp, synthetic construct
  source 1..20: mol_type = other DNA
ctcactacaacctctgtccc

SEQ ID NO: 293191 - DNA, 20 bp, synthetic construct
  source 1..20: mol_type = other DNA
gctcactacaacctctgtcc

SEQ ID NO: 293192 - DNA, 20 bp, synthetic construct
  source 1..20: mol_type = other DNA
ggctcactacaacctctgtc

SEQ ID NO: 293193 - DNA, 20 bp, synthetic construct
  source 1..20: mol_type = other DNA
cggctcactacaacctctgt

SEQ ID NO: 293194 - DNA, 20 bp, synthetic construct
  source 1..20: mol_type = other DNA
tcggctcactacaacctctg

SEQ ID NO: 293195 - DNA, 20 bp, synthetic construct
  source 1..20: mol_type = other DNA
ctcggctcactacaacctct

SEQ ID NO: 293196 - DNA, 20 bp, synthetic construct
  source 1..20: mol_type = other DNA
tctcggctcactacaacctc

SEQ ID NO: 293197 - DNA, 20 bp, synthetic construct
  source 1..20: mol_type = other DNA
atctcggctcactacaacct

SEQ ID NO: 293198 - DNA, 20 bp, synthetic construct
  source 1..20: mol_type = other DNA
gatctcggctcactacaacc

SEQ ID NO: 293199 - DNA, 20 bp, synthetic construct
  source 1..20: mol_type = other DNA
cgatctcggctcactacaac

SEQ ID NO: 293200 - DNA, 20 bp, synthetic construct
  source 1..20: mol_type = other DNA
acgatctcggctcactacaa

SEQ ID NO: 293201 - DNA, 20 bp, synthetic construct
  source 1..20: mol_type = other DNA
cacgatctcggctcactaca

SEQ ID NO: 293202 - DNA, 20 bp, synthetic construct
  source 1..20: mol_type = other DNA
gcacgatctcggctcactac

SEQ ID NO: 293203 - DNA, 20 bp, synthetic construct
  source 1..20: mol_type = other DNA
ggcacgatctcggctcacta

SEQ ID NO: 293204 - DNA, 20 bp, synthetic construct
  source 1..20: mol_type = other DNA
tggcacgatctcggctcact

SEQ ID NO: 293205 - DNA, 20 bp, synthetic construct
  source 1..20: mol_type = other DNA
gtggcacgatctcggctcac

SEQ ID NO: 293206 - DNA, 20 bp, synthetic construct
  source 1..20: mol_type = other DNA
agtggcacgatctcggctca

SEQ ID NO: 293207 - DNA, 20 bp, synthetic construct
  source 1..20: mol_type = other DNA
cagtggcacgatctcggctc

SEQ ID NO: 293208 - DNA, 20 bp, synthetic construct
  source 1..20: mol_type = other DNA
gcagtggcacgatctcggct

SEQ ID NO: 293209 - DNA, 20 bp, synthetic construct
  source 1..20: mol_type = other DNA
tgcagtggcacgatctcggc

SEQ ID NO: 293210 - DNA, 20 bp, synthetic construct
  source 1..20: mol_type = other DNA
gtgcagtggcacgatctcgg

SEQ ID NO: 293211 - DNA, 20 bp, synthetic construct
  source 1..20: mol_type = other DNA
agtgcagtggcacgatctcg

SEQ ID NO: 293212 - DNA, 20 bp, synthetic construct
  source 1..20: mol_type = other DNA
gagtgcagtggcacgatctc

SEQ ID NO: 293213 - DNA, 20 bp, synthetic construct
  source 1..20: mol_type = other DNA
ggagtgcagtggcacgatct

SEQ ID NO: 293214 - DNA, 20 bp, synthetic construct
  source 1..20: mol_type = other DNA
tggagtgcagtggcacgatc

SEQ ID NO: 293215 - DNA, 20 bp, synthetic construct
  source 1..20: mol_type = other DNA
ctggagtgcagtggcacgat

SEQ ID NO: 293216 - DNA, 20 bp, synthetic construct
  source 1..20: mol_type = other DNA
gctggagtgcagtggcacga

SEQ ID NO: 293217 - DNA, 20 bp, synthetic construct
  source 1..20: mol_type = other DNA
ggctggagtgcagtggcacg

SEQ ID NO: 293218 - DNA, 20 bp, synthetic construct
  source 1..20: mol_type = other DNA
aggctggagtgcagtggcac

SEQ ID NO: 293219 - DNA, 20 bp, synthetic construct
  source 1..20: mol_type = other DNA
caggctggagtgcagtggca

SEQ ID NO: 293220 - DNA, 20 bp, synthetic construct
  source 1..20: mol_type = other DNA
ccaggctggagtgcagtggc

SEQ ID NO: 293221 - DNA, 20 bp, synthetic construct
  source 1..20: mol_type = other DNA
cccaggctggagtgcagtgg

SEQ ID NO: 293222 - DNA, 20 bp, synthetic construct
  source 1..20: mol_type = other DNA
gcccaggctggagtgcagtg

SEQ ID NO: 293223 - DNA, 20 bp, synthetic construct
  source 1..20: mol_type = other DNA
tgcccaggctggagtgcagt

SEQ ID NO: 293224 - DNA, 20 bp, synthetic construct
  source 1..20: mol_type = other DNA
ttgcccaggctggagtgcag

SEQ ID NO: 293225 - DNA, 20 bp, synthetic construct
  source 1..20: mol_type = other DNA
gttgcccaggctggagtgca

SEQ ID NO: 293226 - DNA, 20 bp, synthetic construct
  source 1..20: mol_type = other DNA
tgttgcccaggctggagtgc

SEQ ID NO: 293227 - DNA, 20 bp, synthetic construct
  source 1..20: mol_type = other DNA
ctgttgcccaggctggagtg

SEQ ID NO: 293228 - DNA, 20 bp, synthetic construct
  source 1..20: mol_type = other DNA
tctgttgcccaggctggagt

SEQ ID NO: 293229 - DNA, 20 bp, synthetic construct
  source 1..20: mol_type = other DNA
ctctgttgcccaggctggag

SEQ ID NO: 293230 - DNA, 20 bp, synthetic construct
  source 1..20: mol_type = other DNA
actctgttgcccaggctgga

SEQ ID NO: 293231 - DNA, 20 bp, synthetic construct
  source 1..20: mol_type = other DNA
cactctgttgcccaggctgg

SEQ ID NO: 293232 - DNA, 20 bp, synthetic construct
  source 1..20: mol_type = other DNA
tcactctgttgcccaggctg

SEQ ID NO: 293233 - DNA, 20 bp, synthetic construct
  source 1..20: mol_type = other DNA
ctcactctgttgcccaggct

SEQ ID NO: 293234 - DNA, 20 bp, synthetic construct
  source 1..20: mol_type = other DNA
tctcactctgttgcccaggc

SEQ ID NO: 293235 - DNA, 20 bp, synthetic construct
  source 1..20: mol_type = other DNA
atctcactctgttgcccagg

SEQ ID NO: 293236 - DNA, 20 bp, synthetic construct
  source 1..20: mol_type = other DNA
aatctcactctgttgcccag

SEQ ID NO: 293237 - DNA, 20 bp, synthetic construct
  source 1..20: mol_type = other DNA
gaatctcactctgttgccca

SEQ ID NO: 293238 - DNA, 20 bp, synthetic construct
  source 1..20: mol_type = other DNA
ggaatctcactctgttgccc

SEQ ID NO: 293239 - DNA, 20 bp, synthetic construct
  source 1..20: mol_type = other DNA
tggaatctcactctgttgcc

SEQ ID NO: 293240 - DNA, 20 bp, synthetic construct
  source 1..20: mol_type = other DNA
atggaatctcactctgttgc

SEQ ID NO: 293241 - DNA, 20 bp, synthetic construct
  source 1..20: mol_type = other DNA
gatggaatctcactctgttg

SEQ ID NO: 293242 - DNA, 20 bp, synthetic construct
  source 1..20: mol_type = other DNA
agatggaatctcactctgtt

SEQ ID NO: 293243 - DNA, 20 bp, synthetic construct
  source 1..20: mol_type = other DNA
gagatggaatctcactctgt

SEQ ID NO: 293244 - DNA, 20 bp, synthetic construct
  source 1..20: mol_type = other DNA
tgagatggaatctcactctg

SEQ ID NO: 293245 - DNA, 20 bp, synthetic construct
  source 1..20: mol_type = other DNA
gtgagatggaatctcactct

SEQ ID NO: 293246 - DNA, 20 bp, synthetic construct
  source 1..20: mol_type = other DNA
tgtgagatggaatctcactc

SEQ ID NO: 293247 - DNA, 20 bp, synthetic construct
  source 1..20: mol_type = other DNA
ttgtgagatggaatctcact

SEQ ID NO: 293248 - DNA, 20 bp, synthetic construct
  source 1..20: mol_type = other DNA
tttgtgagatggaatctcac

SEQ ID NO: 293249 - DNA, 20 bp, synthetic construct
  source 1..20: mol_type = other DNA
ttttgtgagatggaatctca

SEQ ID NO: 293250 - DNA, 20 bp, synthetic construct
  source 1..20: mol_type = other DNA
tttttgtgagatggaatctc

SEQ ID NO: 293251 - DNA, 20 bp, synthetic construct
  source 1..20: mol_type = other DNA
ttttttgtgagatggaatct

SEQ ID NO: 293252 - DNA, 20 bp, synthetic construct
  source 1..20: mol_type = other DNA
tttttttgtgagatggaatc

SEQ ID NO: 293253 - DNA, 20 bp, synthetic construct
  source 1..20: mol_type = other DNA
ttttttttgtgagatggaat

SEQ ID NO: 293254 - DNA, 20 bp, synthetic construct
  source 1..20: mol_type = other DNA
tttttttttgtgagatggaa

SEQ ID NO: 293255 - DNA, 20 bp, synthetic construct
  source 1..20: mol_type = other DNA
ttttttttttgtgagatgga

SEQ ID NO: 293256 - DNA, 20 bp, synthetic construct
  source 1..20: mol_type = other DNA
tttttttttttgtgagatgg

SEQ ID NO: 293257 - DNA, 20 bp, synthetic construct
  source 1..20: mol_type = other DNA
ttttttttttttgtgagatg

SEQ ID NO: 293258 - DNA, 20 bp, synthetic construct
  source 1..20: mol_type = other DNA
tttttttttttttgtgagat

SEQ ID NO: 293259 - DNA, 20 bp, synthetic construct
  source 1..20: mol_type = other DNA
ttttttttttttttgtgaga

SEQ ID NO: 293260 - DNA, 20 bp, synthetic construct
  source 1..20: mol_type = other DNA
tttttttttttttttgtgag

SEQ ID NO: 293261 - DNA, 20 bp, synthetic construct
  source 1..20: mol_type = other DNA
ttttttttttttttttgtga

SEQ ID NO: 293262 - DNA, 20 bp, synthetic construct
  source 1..20: mol_type = other DNA
cttttttttttttttttgtg

SEQ ID NO: 293263 - DNA, 20 bp, synthetic construct
  source 1..20: mol_type = other DNA
gcttttttttttttttttgt

SEQ ID NO: 293264 - DNA, 20 bp, synthetic construct
  source 1..20: mol_type = other DNA
cgcttttttttttttttttg

SEQ ID NO: 293265 - DNA, 20 bp, synthetic construct
  source 1..20: mol_type = other DNA
tcgctttttttttttttttt

SEQ ID NO: 293266 - DNA, 20 bp, synthetic construct
  source 1..20: mol_type = other DNA
ctcgcttttttttttttttt

SEQ ID NO: 293267 - DNA, 20 bp, synthetic construct
  source 1..20: mol_type = other DNA
tctcgctttttttttttttt

SEQ ID NO: 293268 - DNA, 20 bp, synthetic construct
  source 1..20: mol_type = other DNA
ttctcgcttttttttttttt

SEQ ID NO: 293269 - DNA, 20 bp, synthetic construct
  source 1..20: mol_type = other DNA
gttctcgctttttttttttt

SEQ ID NO: 293270 - DNA, 20 bp, synthetic construct
  source 1..20: mol_type = other DNA
ggttctcgcttttttttttt

SEQ ID NO: 293271 - DNA, 20 bp, synthetic construct
  source 1..20: mol_type = other DNA
tggttctcgctttttttttt

SEQ ID NO: 293272 - DNA, 20 bp, synthetic construct
  source 1..20: mol_type = other DNA
gtggttctcgcttttttttt

SEQ ID NO: 293273 - DNA, 20 bp, synthetic construct
  source 1..20: mol_type = other DNA
agtggttctcgctttttttt

SEQ ID NO: 293274 - DNA, 20 bp, synthetic construct
  source 1..20: mol_type = other DNA
cagtggttctcgcttttttt

SEQ ID NO: 293275 - DNA, 20 bp, synthetic construct
  source 1..20: mol_type = other DNA
acagtggttctcgctttttt

SEQ ID NO: 293276 - DNA, 20 bp, synthetic construct
  source 1..20: mol_type = other DNA
gacagtggttctcgcttttt

SEQ ID NO: 293277 - DNA, 20 bp, synthetic construct
  source 1..20: mol_type = other DNA
ggacagtggttctcgctttt

SEQ ID NO: 293278 - DNA, 20 bp, synthetic construct
  source 1..20: mol_type = other DNA
aggacagtggttctcgcttt

SEQ ID NO: 293279 - DNA, 20 bp, synthetic construct
  source 1..20: mol_type = other DNA
taggacagtggttctcgctt

SEQ ID NO: 293280 - DNA, 20 bp, synthetic construct
  source 1..20: mol_type = other DNA
ctaggacagtggttctcgct

SEQ ID NO: 293281 - DNA, 20 bp, synthetic construct
  source 1..20: mol_type = other DNA
cctaggacagtggttctcgc

SEQ ID NO: 293282 - DNA, 20 bp, synthetic construct
  source 1..20: mol_type = other DNA
gcctaggacagtggttctcg

SEQ ID NO: 293283 - DNA, 20 bp, synthetic construct
  source 1..20: mol_type = other DNA
ggcctaggacagtggttctc

SEQ ID NO: 293284 - DNA, 20 bp, synthetic construct
  source 1..20: mol_type = other DNA
gggcctaggacagtggttct

SEQ ID NO: 293285 - DNA, 20 bp, synthetic construct
  source 1..20: mol_type = other DNA
agggcctaggacagtggttc

SEQ ID NO: 293286 - DNA, 20 bp, synthetic construct
  source 1..20: mol_type = other DNA
cagggcctaggacagtggtt

SEQ ID NO: 293287 - DNA, 20 bp, synthetic construct
  source 1..20: mol_type = other DNA
tcagggcctaggacagtggt

SEQ ID NO: 293288 - DNA, 20 bp, synthetic construct
  source 1..20: mol_type = other DNA
atcagggcctaggacagtgg

SEQ ID NO: 293289 - DNA, 20 bp, synthetic construct
  source 1..20: mol_type = other DNA
catcagggcctaggacagtg

SEQ ID NO: 293290 - DNA, 20 bp, synthetic construct
  source 1..20: mol_type = other DNA
acatcagggcctaggacagt

SEQ ID NO: 293291 - DNA, 20 bp, synthetic construct
  source 1..20: mol_type = other DNA
aacatcagggcctaggacag

SEQ ID NO: 293292 - DNA, 20 bp, synthetic construct
  source 1..20: mol_type = other DNA
aaacatcagggcctaggaca

SEQ ID NO: 293293 - DNA, 20 bp, synthetic construct
  source 1..20: mol_type = other DNA
caaacatcagggcctaggac

SEQ ID NO: 293294 - DNA, 20 bp, synthetic construct
  source 1..20: mol_type = other DNA
gcaaacatcagggcctagga

SEQ ID NO: 293295 - DNA, 20 bp, synthetic construct
  source 1..20: mol_type = other DNA
tgcaaacatcagggcctagg

SEQ ID NO: 293296 - DNA, 20 bp, synthetic construct
  source 1..20: mol_type = other DNA
ctgcaaacatcagggcctag

SEQ ID NO: 293297 - DNA, 20 bp, synthetic construct
  source 1..20: mol_type = other DNA
cctgcaaacatcagggccta

SEQ ID NO: 293298 - DNA, 20 bp, synthetic construct
  source 1..20: mol_type = other DNA
gcctgcaaacatcagggcct

SEQ ID NO: 293299 - DNA, 20 bp, synthetic construct
  source 1..20: mol_type = other DNA
tgcctgcaaacatcagggcc

SEQ ID NO: 293300 - DNA, 20 bp, synthetic construct
  source 1..20: mol_type = other DNA
ttgcctgcaaacatcagggc

SEQ ID NO: 293301 - DNA, 20 bp, synthetic construct
  source 1..20: mol_type = other DNA
gttgcctgcaaacatcaggg

SEQ ID NO: 293302 - DNA, 20 bp, synthetic construct
  source 1..20: mol_type = other DNA
agttgcctgcaaacatcagg

SEQ ID NO: 293303 - DNA, 20 bp, synthetic construct
  source 1..20: mol_type = other DNA
tagttgcctgcaaacatcag

SEQ ID NO: 293304 - DNA, 20 bp, synthetic construct
  source 1..20: mol_type = other DNA
ttagttgcctgcaaacatca

SEQ ID NO: 293305 - DNA, 20 bp, synthetic construct
  source 1..20: mol_type = other DNA
tttagttgcctgcaaacatc

SEQ ID NO: 293306 - DNA, 20 bp, synthetic construct
  source 1..20: mol_type = other DNA
ttttagttgcctgcaaacat

SEQ ID NO: 293307 - DNA, 20 bp, synthetic construct
  source 1..20: mol_type = other DNA
tttttagttgcctgcaaaca

SEQ ID NO: 293308 - DNA, 20 bp, synthetic construct
  source 1..20: mol_type = other DNA
ttttttagttgcctgcaaac

SEQ ID NO: 293309 - DNA, 20 bp, synthetic construct
  source 1..20: mol_type = other DNA
cttttttagttgcctgcaaa

SEQ ID NO: 293310 - DNA, 20 bp, synthetic construct
  source 1..20: mol_type = other DNA
ccttttttagttgcctgcaa

SEQ ID NO: 293311 - DNA, 20 bp, synthetic construct
  source 1..20: mol_type = other DNA
tccttttttagttgcctgca

SEQ ID NO: 293312 - DNA, 20 bp, synthetic construct
  source 1..20: mol_type = other DNA
ttccttttttagttgcctgc

SEQ ID NO: 293313 - DNA, 20 bp, synthetic construct
  source 1..20: mol_type = other DNA
cttccttttttagttgcctg

SEQ ID NO: 293314 - DNA, 20 bp, synthetic construct
  source 1..20: mol_type = other DNA
acttccttttttagttgcct

SEQ ID NO: 293315 - DNA, 20 bp, synthetic construct
  source 1..20: mol_type = other DNA
cacttccttttttagttgcc

SEQ ID NO: 293316 - DNA, 20 bp, synthetic construct
  source 1..20: mol_type = other DNA
ccacttccttttttagttgc

SEQ ID NO: 293317 - DNA, 20 bp, synthetic construct
  source 1..20: mol_type = other DNA
tccacttccttttttagttg

SEQ ID NO: 293318 - DNA, 20 bp, synthetic construct
  source 1..20: mol_type = other DNA
gtccacttccttttttagtt

SEQ ID NO: 293319 - DNA, 20 bp, synthetic construct
  source 1..20: mol_type = other DNA
tgtccacttccttttttagt

SEQ ID NO: 293320 - DNA, 20 bp, synthetic construct
  source 1..20: mol_type = other DNA
atgtccacttccttttttag

SEQ ID NO: 293321 - DNA, 20 bp, synthetic construct
  source 1..20: mol_type = other DNA
gatgtccacttcctttttta

SEQ ID NO: 293322 - DNA, 20 bp, synthetic construct
  source 1..20: mol_type = other DNA
ggatgtccacttcctttttt

SEQ ID NO: 293323 - DNA, 20 bp, synthetic construct
  source 1..20: mol_type = other DNA
gggatgtccacttccttttt

SEQ ID NO: 293324 - DNA, 20 bp, synthetic construct
  source 1..20: mol_type = other DNA
ggggatgtccacttcctttt

SEQ ID NO: 293325 - DNA, 20 bp, synthetic construct
  source 1..20: mol_type = other DNA
tggggatgtccacttccttt

SEQ ID NO: 293326 - DNA, 20 bp, synthetic construct
  source 1..20: mol_type = other DNA
ctggggatgtccacttcctt

SEQ ID NO: 293327 - DNA, 20 bp, synthetic construct
  source 1..20: mol_type = other DNA
actggggatgtccacttcct

SEQ ID NO: 293328 - DNA, 20 bp, synthetic construct
  source 1..20: mol_type = other DNA
gactggggatgtccacttcc

SEQ ID NO: 293329 - DNA, 20 bp, synthetic construct
  source 1..20: mol_type = other DNA
tgactggggatgtccacttc

SEQ ID NO: 293330 - DNA, 20 bp, synthetic construct
  source 1..20: mol_type = other DNA
ctgactggggatgtccactt

SEQ ID NO: 293331 - DNA, 20 bp, synthetic construct
  source 1..20: mol_type = other DNA
gctgactggggatgtccact

SEQ ID NO: 293332 - DNA, 20 bp, synthetic construct
  source 1..20: mol_type = other DNA
agctgactggggatgtccac

SEQ ID NO: 293333 - DNA, 20 bp, synthetic construct
  source 1..20: mol_type = other DNA
cagctgactggggatgtcca

SEQ ID NO: 293334 - DNA, 20 bp, synthetic construct
  source 1..20: mol_type = other DNA
acagctgactggggatgtcc

SEQ ID NO: 293335 - DNA, 20 bp, synthetic construct
  source 1..20: mol_type = other DNA
cacagctgactggggatgtc

SEQ ID NO: 293336 - DNA, 20 bp, synthetic construct
  source 1..20: mol_type = other DNA
ccacagctgactggggatgt

SEQ ID NO: 293337 - DNA, 20 bp, synthetic construct
  source 1..20: mol_type = other DNA
gccacagctgactggggatg

SEQ ID NO: 293338 - DNA, 20 bp, synthetic construct
  source 1..20: mol_type = other DNA
cgccacagctgactggggat

SEQ ID NO: 293339 - DNA, 20 bp, synthetic construct
  source 1..20: mol_type = other DNA
gcgccacagctgactgggga

SEQ ID NO: 293340 - DNA, 20 bp, synthetic construct
  source 1..20: mol_type = other DNA
tgcgccacagctgactgggg

SEQ ID NO: 293341 - DNA, 20 bp, synthetic construct
  source 1..20: mol_type = other DNA
gtgcgccacagctgactggg

SEQ ID NO: 293342 - DNA, 20 bp, synthetic construct
  source 1..20: mol_type = other DNA
ggtgcgccacagctgactgg

SEQ ID NO: 293343 - DNA, 20 bp, synthetic construct
  source 1..20: mol_type = other DNA
tggtgcgccacagctgactg

SEQ ID NO: 293344 - DNA, 20 bp, synthetic construct
  source 1..20: mol_type = other DNA
ttggtgcgccacagctgact

SEQ ID NO: 293345 - DNA, 20 bp, synthetic construct
  source 1..20: mol_type = other DNA
cttggtgcgccacagctgac

SEQ ID NO: 293346 - DNA, 20 bp, synthetic construct
  source 1..20: mol_type = other DNA
tcttggtgcgccacagctga

SEQ ID NO: 293347 - DNA, 20 bp, synthetic construct
  source 1..20: mol_type = other DNA
ttcttggtgcgccacagctg

SEQ ID NO: 293348 - DNA, 20 bp, synthetic construct
  source 1..20: mol_type = other DNA
gttcttggtgcgccacagct

SEQ ID NO: 293349 - DNA, 20 bp, synthetic construct
  source 1..20: mol_type = other DNA
tgttcttggtgcgccacagc

SEQ ID NO: 293350 - DNA, 20 bp, synthetic construct
  source 1..20: mol_type = other DNA
ttgttcttggtgcgccacag

SEQ ID NO: 293351 - DNA, 20 bp, synthetic construct
  source 1..20: mol_type = other DNA
cttgttcttggtgcgccaca

SEQ ID NO: 293352 - DNA, 20 bp, synthetic construct
  source 1..20: mol_type = other DNA
acttgttcttggtgcgccac

SEQ ID NO: 293353 - DNA, 20 bp, synthetic construct
  source 1..20: mol_type = other DNA
gacttgttcttggtgcgcca

SEQ ID NO: 293354 - DNA, 20 bp, synthetic construct
  source 1..20: mol_type = other DNA
tgacttgttcttggtgcgcc

SEQ ID NO: 293355 - DNA, 20 bp, synthetic construct
  source 1..20: mol_type = other DNA
atgacttgttcttggtgcgc

SEQ ID NO: 293356 - DNA, 20 bp, synthetic construct
  source 1..20: mol_type = other DNA
catgacttgttcttggtgcg

SEQ ID NO: 293357 - DNA, 20 bp, synthetic construct
  source 1..20: mol_type = other DNA
ccatgacttgttcttggtgc

SEQ ID NO: 293358 - DNA, 20 bp, synthetic construct
  source 1..20: mol_type = other DNA
cccatgacttgttcttggtg

SEQ ID NO: 293359 - DNA, 20 bp, synthetic construct
  source 1..20: mol_type = other DNA
tcccatgacttgttcttggt

SEQ ID NO: 293360 - DNA, 20 bp, synthetic construct
  source 1..20: mol_type = other DNA
ttcccatgacttgttcttgg

SEQ ID NO: 293361 - DNA, 20 bp, synthetic construct
  source 1..20: mol_type = other DNA
gttcccatgacttgttcttg

SEQ ID NO: 293362 - DNA, 20 bp, synthetic construct
  source 1..20: mol_type = other DNA
tgttcccatgacttgttctt

SEQ ID NO: 293363 - DNA, 20 bp, synthetic construct
  source 1..20: mol_type = other DNA
atgttcccatgacttgttct

SEQ ID NO: 293364 - DNA, 20 bp, synthetic construct
  source 1..20: mol_type = other DNA
tatgttcccatgacttgttc

SEQ ID NO: 293365 - DNA, 20 bp, synthetic construct
  source 1..20: mol_type = other DNA
ttatgttcccatgacttgtt

SEQ ID NO: 293366 - DNA, 20 bp, synthetic construct
  source 1..20: mol_type = other DNA
gttatgttcccatgacttgt

SEQ ID NO: 293367 - DNA, 20 bp, synthetic construct
  source 1..20: mol_type = other DNA
ggttatgttcccatgacttg

SEQ ID NO: 293368 - DNA, 20 bp, synthetic construct
  source 1..20: mol_type = other DNA
aggttatgttcccatgactt

SEQ ID NO: 293369 - DNA, 20 bp, synthetic construct
  source 1..20: mol_type = other DNA
taggttatgttcccatgact

SEQ ID NO: 293370 - DNA, 20 bp, synthetic construct
  source 1..20: mol_type = other DNA
ttaggttatgttcccatgac

SEQ ID NO: 293371 - DNA, 20 bp, synthetic construct
  source 1..20: mol_type = other DNA
attaggttatgttcccatga

SEQ ID NO: 293372 - DNA, 20 bp, synthetic construct
  source 1..20: mol_type = other DNA
aattaggttatgttcccatg

SEQ ID NO: 293373 - DNA, 20 bp, synthetic construct
  source 1..20: mol_type = other DNA
aaattaggttatgttcccat

SEQ ID NO: 293374 - DNA, 20 bp, synthetic construct
  source 1..20: mol_type = other DNA
aaaattaggttatgttccca

SEQ ID NO: 293375 - DNA, 20 bp, synthetic construct
  source 1..20: mol_type = other DNA
gaaaattaggttatgttccc

SEQ ID NO: 293376 - DNA, 20 bp, synthetic construct
  source 1..20: mol_type = other DNA
agaaaattaggttatgttcc

SEQ ID NO: 293377 - DNA, 20 bp, synthetic construct
  source 1..20: mol_type = other DNA
tagaaaattaggttatgttc

SEQ ID NO: 293378 - DNA, 20 bp, synthetic construct
  source 1..20: mol_type = other DNA
ttagaaaattaggttatgtt

SEQ ID NO: 293379 - DNA, 20 bp, synthetic construct
  source 1..20: mol_type = other DNA
tttagaaaattaggttatgt

SEQ ID NO: 293380 - DNA, 20 bp, synthetic construct
  source 1..20: mol_type = other DNA
atttagaaaattaggttatg

SEQ ID NO: 293381 - DNA, 20 bp, synthetic construct
  source 1..20: mol_type = other DNA
catttagaaaattaggttat

SEQ ID NO: 293382 - DNA, 20 bp, synthetic construct
  source 1..20: mol_type = other DNA
ccatttagaaaattaggtta

SEQ ID NO: 293383 - DNA, 20 bp, synthetic construct
  source 1..20: mol_type = other DNA
cccatttagaaaattaggtt

SEQ ID NO: 293384 - DNA, 20 bp, synthetic construct
  source 1..20: mol_type = other DNA
acccatttagaaaattaggt

SEQ ID NO: 293385 - DNA, 20 bp, synthetic construct
  source 1..20: mol_type = other DNA
aacccatttagaaaattagg

SEQ ID NO: 293386 - DNA, 20 bp, synthetic construct
  source 1..20: mol_type = other DNA
taacccatttagaaaattag

SEQ ID NO: 293387 - DNA, 20 bp, synthetic construct
  source 1..20: mol_type = other DNA
gtaacccatttagaaaatta

SEQ ID NO: 293388 - DNA, 20 bp, synthetic construct
  source 1..20: mol_type = other DNA
agtaacccatttagaaaatt

SEQ ID NO: 293389 - DNA, 20 bp, synthetic construct
  source 1..20: mol_type = other DNA
tagtaacccatttagaaaat

SEQ ID NO: 293390 - DNA, 20 bp, synthetic construct
  source 1..20: mol_type = other DNA
ctagtaacccatttagaaaa

SEQ ID NO: 293391 - DNA, 20 bp, synthetic construct
  source 1..20: mol_type = other DNA
cctagtaacccatttagaaa

SEQ ID NO: 293392 - DNA, 20 bp, synthetic construct
  source 1..20: mol_type = other DNA
gcctagtaacccatttagaa

SEQ ID NO: 293393 - DNA, 20 bp, synthetic construct
  source 1..20: mol_type = other DNA
tgcctagtaacccatttaga

SEQ ID NO: 293394 - DNA, 20 bp, synthetic construct
  source 1..20: mol_type = other DNA
gtgcctagtaacccatttag

SEQ ID NO: 293395 - DNA, 20 bp, synthetic construct
  source 1..20: mol_type = other DNA
agtgcctagtaacccattta

SEQ ID NO: 293396 - DNA, 20 bp, synthetic construct
  source 1..20: mol_type = other DNA
aagtgcctagtaacccattt

SEQ ID NO: 293397 - DNA, 20 bp, synthetic construct
  source 1..20: mol_type = other DNA
taagtgcctagtaacccatt

SEQ ID NO: 293398 - DNA, 20 bp, synthetic construct
  source 1..20: mol_type = other DNA
ctaagtgcctagtaacccat

SEQ ID NO: 293399 - DNA, 20 bp, synthetic construct
  source 1..20: mol_type = other DNA
tctaagtgcctagtaaccca

SEQ ID NO: 293400 - DNA, 20 bp, synthetic construct
  source 1..20: mol_type = other DNA
ctctaagtgcctagtaaccc

SEQ ID NO: 293401 - DNA, 20 bp, synthetic construct
  source 1..20: mol_type = other DNA
gctctaagtgcctagtaacc

SEQ ID NO: 293402 - DNA, 20 bp, synthetic construct
  source 1..20: mol_type = other DNA
tgctctaagtgcctagtaac

SEQ ID NO: 293403 - DNA, 20 bp, synthetic construct
  source 1..20: mol_type = other DNA
ttgctctaagtgcctagtaa

SEQ ID NO: 293404 - DNA, 20 bp, synthetic construct
  source 1..20: mol_type = other DNA
tttgctctaagtgcctagta

SEQ ID NO: 293405 - DNA, 20 bp, synthetic construct
  source 1..20: mol_type = other DNA
ttttgctctaagtgcctagt

SEQ ID NO: 293406 - DNA, 20 bp, synthetic construct
  source 1..20: mol_type = other DNA
gttttgctctaagtgcctag

SEQ ID NO: 293407 - DNA, 20 bp, synthetic construct
  source 1..20: mol_type = other DNA
tgttttgctctaagtgccta

SEQ ID NO: 293408 - DNA, 20 bp, synthetic construct
  source 1..20: mol_type = other DNA
ttgttttgctctaagtgcct

SEQ ID NO: 293409 - DNA, 20 bp, synthetic construct
  source 1..20: mol_type = other DNA
attgttttgctctaagtgcc

SEQ ID NO: 293410 - DNA, 20 bp, synthetic construct
  source 1..20: mol_type = other DNA
cattgttttgctctaagtgc

SEQ ID NO: 293411 - DNA, 20 bp, synthetic construct
  source 1..20: mol_type = other DNA
tcattgttttgctctaagtg

SEQ ID NO: 293412 - DNA, 20 bp, synthetic construct
  source 1..20: mol_type = other DNA
atcattgttttgctctaagt

SEQ ID NO: 293413 - DNA, 20 bp, synthetic construct
  source 1..20: mol_type = other DNA
catcattgttttgctctaag

SEQ ID NO: 293414 - DNA, 20 bp, synthetic construct
  source 1..20: mol_type = other DNA
gcatcattgttttgctctaa

SEQ ID NO: 293415 - DNA, 20 bp, synthetic construct
  source 1..20: mol_type = other DNA
ggcatcattgttttgctcta

SEQ ID NO: 293416 - DNA, 20 bp, synthetic construct
  source 1..20: mol_type = other DNA
cggcatcattgttttgctct

SEQ ID NO: 293417 - DNA, 20 bp, synthetic construct
  source 1..20: mol_type = other DNA
tcggcatcattgttttgctc

SEQ ID NO: 293418 - DNA, 20 bp, synthetic construct
  source 1..20: mol_type = other DNA
ttcggcatcattgttttgct

SEQ ID NO: 293419 - DNA, 20 bp, synthetic construct
  source 1..20: mol_type = other DNA
tttcggcatcattgttttgc

SEQ ID NO: 293420 - DNA, 20 bp, synthetic construct
  source 1..20: mol_type = other DNA
atttcggcatcattgttttg

SEQ ID NO: 293421 - DNA, 20 bp, synthetic construct
  source 1..20: mol_type = other DNA
gatttcggcatcattgtttt

SEQ ID NO: 293422 - DNA, 20 bp, synthetic construct
  source 1..20: mol_type = other DNA
ggatttcggcatcattgttt

SEQ ID NO: 293423 - DNA, 20 bp, synthetic construct
  source 1..20: mol_type = other DNA
aggatttcggcatcattgtt

SEQ ID NO: 293424 - DNA, 20 bp, synthetic construct
  source 1..20: mol_type = other DNA
caggatttcggcatcattgt

SEQ ID NO: 293425 - DNA, 20 bp, synthetic construct
  source 1..20: mol_type = other DNA
tcaggatttcggcatcattg

SEQ ID NO: 293426 - DNA, 20 bp, synthetic construct
  source 1..20: mol_type = other DNA
atcaggatttcggcatcatt

SEQ ID NO: 293427 - DNA, 20 bp, synthetic construct
  source 1..20: mol_type = other DNA
aatcaggatttcggcatcat

SEQ ID NO: 293428 - DNA, 20 bp, synthetic construct
  source 1..20: mol_type = other DNA
aaatcaggatttcggcatca

SEQ ID NO: 293429 - DNA, 20 bp, synthetic construct
  source 1..20: mol_type = other DNA
gaaatcaggatttcggcatc

SEQ ID NO: 293430 - DNA, 20 bp, synthetic construct
  source 1..20: mol_type = other DNA
tgaaatcaggatttcggcat

SEQ ID NO: 293431 - DNA, 20 bp, synthetic construct
  source 1..20: mol_type = other DNA
ctgaaatcaggatttcggca

SEQ ID NO: 293432 - DNA, 20 bp, synthetic construct
  source 1..20: mol_type = other DNA
gctgaaatcaggatttcggc

SEQ ID NO: 293433 - DNA, 20 bp, synthetic construct
  source 1..20: mol_type = other DNA
tgctgaaatcaggatttcgg

SEQ ID NO: 293434 - DNA, 20 bp, synthetic construct
  source 1..20: mol_type = other DNA
ttgctgaaatcaggatttcg

SEQ ID NO: 293435 - DNA, 20 bp, synthetic construct
  source 1..20: mol_type = other DNA
tttgctgaaatcaggatttc

SEQ ID NO: 293436 - DNA, 20 bp, synthetic construct
  source 1..20: mol_type = other DNA
ctttgctgaaatcaggattt

SEQ ID NO: 293437 - DNA, 20 bp, synthetic construct
  source 1..20: mol_type = other DNA
gctttgctgaaatcaggatt

SEQ ID NO: 293438 - DNA, 20 bp, synthetic construct
  source 1..20: mol_type = other DNA
ggctttgctgaaatcaggat

SEQ ID NO: 293439 - DNA, 20 bp, synthetic construct
  source 1..20: mol_type = other DNA
aggctttgctgaaatcagga

SEQ ID NO: 293440 - DNA, 20 bp, synthetic construct
  source 1..20: mol_type = other DNA
gaggctttgctgaaatcagg

SEQ ID NO: 293441 - DNA, 20 bp, synthetic construct
  source 1..20: mol_type = other DNA
agaggctttgctgaaatcag

SEQ ID NO: 293442 - DNA, 20 bp, synthetic construct
  source 1..20: mol_type = other DNA
cagaggctttgctgaaatca

SEQ ID NO: 293443 - DNA, 20 bp, synthetic construct
  source 1..20: mol_type = other DNA
gcagaggctttgctgaaatc

SEQ ID NO: 293444 - DNA, 20 bp, synthetic construct
  source 1..20: mol_type = other DNA
ggcagaggctttgctgaaat

SEQ ID NO: 293445 - DNA, 20 bp, synthetic construct
  source 1..20: mol_type = other DNA
aggcagaggctttgctgaaa

SEQ ID NO: 293446 - DNA, 20 bp, synthetic construct
  source 1..20: mol_type = other DNA
caggcagaggctttgctgaa

SEQ ID NO: 293447 - DNA, 20 bp, synthetic construct
  source 1..20: mol_type = other DNA
gcaggcagaggctttgctga

SEQ ID NO: 293448 - DNA, 20 bp, synthetic construct
  source 1..20: mol_type = other DNA
ggcaggcagaggctttgctg

SEQ ID NO: 293449 - DNA, 20 bp, synthetic construct
  source 1..20: mol_type = other DNA
aggcaggcagaggctttgct

SEQ ID NO: 293450 - DNA, 20 bp, synthetic construct
  source 1..20: mol_type = other DNA
caggcaggcagaggctttgc

SEQ ID NO: 293451 - DNA, 20 bp, synthetic construct
  source 1..20: mol_type = other DNA
acaggcaggcagaggctttg

SEQ ID NO: 293452 - DNA, 20 bp, synthetic construct
  source 1..20: mol_type = other DNA
gacaggcaggcagaggcttt

SEQ ID NO: 293453 - DNA, 20 bp, synthetic construct
  source 1..20: mol_type = other DNA
agacaggcaggcagaggctt

SEQ ID NO: 293454 - DNA, 20 bp, synthetic construct
  source 1..20: mol_type = other DNA
aagacaggcaggcagaggct

SEQ ID NO: 293455 - DNA, 20 bp, synthetic construct
  source 1..20: mol_type = other DNA
caagacaggcaggcagaggc

SEQ ID NO: 293456 - DNA, 20 bp, synthetic construct
  source 1..20: mol_type = other DNA
ccaagacaggcaggcagagg

SEQ ID NO: 293457 - DNA, 20 bp, synthetic construct
  source 1..20: mol_type = other DNA
tccaagacaggcaggcagag

SEQ ID NO: 293458 - DNA, 20 bp, synthetic construct
  source 1..20: mol_type = other DNA
ttccaagacaggcaggcaga

SEQ ID NO: 293459 - DNA, 20 bp, synthetic construct
  source 1..20: mol_type = other DNA
cttccaagacaggcaggcag

SEQ ID NO: 293460 - DNA, 20 bp, synthetic construct
  source 1..20: mol_type = other DNA
acttccaagacaggcaggca

SEQ ID NO: 293461 - DNA, 20 bp, synthetic construct
  source 1..20: mol_type = other DNA
tacttccaagacaggcaggc

SEQ ID NO: 293462 - DNA, 20 bp, synthetic construct
  source 1..20: mol_type = other DNA
atacttccaagacaggcagg

SEQ ID NO: 293463 - DNA, 20 bp, synthetic construct
  source 1..20: mol_type = other DNA
gatacttccaagacaggcag

SEQ ID NO: 293464 - DNA, 20 bp, synthetic construct
  source 1..20: mol_type = other DNA
ggatacttccaagacaggca

SEQ ID NO: 293465 - DNA, 20 bp, synthetic construct
  source 1..20: mol_type = other DNA
tggatacttccaagacaggc

SEQ ID NO: 293466 - DNA, 20 bp, synthetic construct
  source 1..20: mol_type = other DNA
gtggatacttccaagacagg

SEQ ID NO: 293467 - DNA, 20 bp, synthetic construct
  source 1..20: mol_type = other DNA
tgtggatacttccaagacag

SEQ ID NO: 293468 - DNA, 20 bp, synthetic construct
  source 1..20: mol_type = other DNA
atgtggatacttccaagaca

SEQ ID NO: 293469 - DNA, 20 bp, synthetic construct
  source 1..20: mol_type = other DNA
catgtggatacttccaagac

SEQ ID NO: 293470 - DNA, 20 bp, synthetic construct
  source 1..20: mol_type = other DNA
tcatgtggatacttccaaga

SEQ ID NO: 293471 - DNA, 20 bp, synthetic construct
  source 1..20: mol_type = other DNA
ctcatgtggatacttccaag

SEQ ID NO: 293472 - DNA, 20 bp, synthetic construct
  source 1..20: mol_type = other DNA
cctcatgtggatacttccaa

SEQ ID NO: 293473 - DNA, 20 bp, synthetic construct
  source 1..20: mol_type = other DNA
gcctcatgtggatacttcca

SEQ ID NO: 293474 - DNA, 20 bp, synthetic construct
  source 1..20: mol_type = other DNA
agcctcatgtggatacttcc

SEQ ID NO: 293475 - DNA, 20 bp, synthetic construct
  source 1..20: mol_type = other DNA
cagcctcatgtggatacttc

SEQ ID NO: 293476 - DNA, 20 bp, synthetic construct
  source 1..20: mol_type = other DNA
gcagcctcatgtggatactt

SEQ ID NO: 293477 - DNA, 20 bp, synthetic construct
  source 1..20: mol_type = other DNA
agcagcctcatgtggatact

SEQ ID NO: 293478 - DNA, 20 bp, synthetic construct
  source 1..20: mol_type = other DNA
cagcagcctcatgtggatac

SEQ ID NO: 293479 - DNA, 20 bp, synthetic construct
  source 1..20: mol_type = other DNA
ccagcagcctcatgtggata

SEQ ID NO: 293480 - DNA, 20 bp, synthetic construct
  source 1..20: mol_type = other DNA
cccagcagcctcatgtggat

SEQ ID NO: 293481 - DNA, 20 bp, synthetic construct
  source 1..20: mol_type = other DNA
ccccagcagcctcatgtgga

SEQ ID NO: 293482 - DNA, 20 bp, synthetic construct
  source 1..20: mol_type = other DNA
gccccagcagcctcatgtgg

SEQ ID NO: 293483 - DNA, 20 bp, synthetic construct
  source 1..20: mol_type = other DNA
ggccccagcagcctcatgtg

SEQ ID NO: 293484 - DNA, 20 bp, synthetic construct
  source 1..20: mol_type = other DNA
aggccccagcagcctcatgt

SEQ ID NO: 293485 - DNA, 20 bp, synthetic construct
  source 1..20: mol_type = other DNA
aaggccccagcagcctcatg

SEQ ID NO: 293486 - DNA, 20 bp, synthetic construct
  source 1..20: mol_type = other DNA
caaggccccagcagcctcat

SEQ ID NO: 293487 - DNA, 20 bp, synthetic construct
  source 1..20: mol_type = other DNA
ccaaggccccagcagcctca

SEQ ID NO: 293488 - DNA, 20 bp, synthetic construct
  source 1..20: mol_type = other DNA
accaaggccccagcagcctc

SEQ ID NO: 293489 - DNA, 20 bp, synthetic construct
  source 1..20: mol_type = other DNA
caccaaggccccagcagcct

SEQ ID NO: 293490 - DNA, 20 bp, synthetic construct
  source 1..20: mol_type = other DNA
acaccaaggccccagcagcc

SEQ ID NO: 293491 - DNA, 20 bp, synthetic construct
  source 1..20: mol_type = other DNA
gacaccaaggccccagcagc

SEQ ID NO: 293492 - DNA, 20 bp, synthetic construct
  source 1..20: mol_type = other DNA
ggacaccaaggccccagcag

SEQ ID NO: 293493 - DNA, 20 bp, synthetic construct
  source 1..20: mol_type = other DNA
gggacaccaaggccccagca

SEQ ID NO: 293494 - DNA, 20 bp, synthetic construct
  source 1..20: mol_type = other DNA
ggggacaccaaggccccagc

SEQ ID NO: 293495 - DNA, 20 bp, synthetic construct
  source 1..20: mol_type = other DNA
tggggacaccaaggccccag

SEQ ID NO: 293496 - DNA, 20 bp, synthetic construct
  source 1..20: mol_type = other DNA
ctggggacaccaaggcccca

SEQ ID NO: 293497 - DNA, 20 bp, synthetic construct
  source 1..20: mol_type = other DNA
gctggggacaccaaggcccc

SEQ ID NO: 293498 - DNA, 20 bp, synthetic construct
  source 1..20: mol_type = other DNA
tgctggggacaccaaggccc

SEQ ID NO: 293499 - DNA, 20 bp, synthetic construct
  source 1..20: mol_type = other DNA
ctgctggggacaccaaggcc

SEQ ID NO: 293500 - DNA, 20 bp, synthetic construct
  source 1..20: mol_type = other DNA
actgctggggacaccaaggc

SEQ ID NO: 293501 - DNA, 20 bp, synthetic construct
  source 1..20: mol_type = other DNA
aactgctggggacaccaagg

SEQ ID NO: 293502 - DNA, 20 bp, synthetic construct
  source 1..20: mol_type = other DNA
aaactgctggggacaccaag

SEQ ID NO: 293503 - DNA, 20 bp, synthetic construct
  source 1..20: mol_type = other DNA
gaaactgctggggacaccaa

SEQ ID NO: 293504 - DNA, 20 bp, synthetic construct
  source 1..20: mol_type = other DNA
agaaactgctggggacacca

SEQ ID NO: 293505 - DNA, 20 bp, synthetic construct
  source 1..20: mol_type = other DNA
tagaaactgctggggacacc

SEQ ID NO: 293506 - DNA, 20 bp, synthetic construct
  source 1..20: mol_type = other DNA
ctagaaactgctggggacac

SEQ ID NO: 293507 - DNA, 20 bp, synthetic construct
  source 1..20: mol_type = other DNA
actagaaactgctggggaca

SEQ ID NO: 293508 - DNA, 20 bp, synthetic construct
  source 1..20: mol_type = other DNA
gactagaaactgctggggac

SEQ ID NO: 293509 - DNA, 20 bp, synthetic construct
  source 1..20: mol_type = other DNA
agactagaaactgctgggga

SEQ ID NO: 293510 - DNA, 20 bp, synthetic construct
  source 1..20: mol_type = other DNA
gagactagaaactgctgggg

SEQ ID NO: 293511 - DNA, 20 bp, synthetic construct
  source 1..20: mol_type = other DNA
agagactagaaactgctggg

SEQ ID NO: 293512 - DNA, 20 bp, synthetic construct
  source 1..20: mol_type = other DNA
tagagactagaaactgctgg

SEQ ID NO: 293513 - DNA, 20 bp, synthetic construct
  source 1..20: mol_type = other DNA
ctagagactagaaactgctg

SEQ ID NO: 293514 - DNA, 20 bp, synthetic construct
  source 1..20: mol_type = other DNA
cctagagactagaaactgct

SEQ ID NO: 293515 - DNA, 20 bp, synthetic construct
  source 1..20: mol_type = other DNA
acctagagactagaaactgc

SEQ ID NO: 293516 - DNA, 20 bp, synthetic construct
  source 1..20: mol_type = other DNA
gacctagagactagaaactg

SEQ ID NO: 293517 - DNA, 20 bp, synthetic construct
  source 1..20: mol_type = other DNA
agacctagagactagaaact

SEQ ID NO: 293518 - DNA, 20 bp, synthetic construct
  source 1..20: mol_type = other DNA
aagacctagagactagaaac

SEQ ID NO: 293519 - DNA, 20 bp, synthetic construct
  source 1..20: mol_type = other DNA
caagacctagagactagaaa

SEQ ID NO: 293520 - DNA, 20 bp, synthetic construct
  source 1..20: mol_type = other DNA
gcaagacctagagactagaa

SEQ ID NO: 293521 - DNA, 20 bp, synthetic construct
  source 1..20: mol_type = other DNA
agcaagacctagagactaga

SEQ ID NO: 293522 - DNA, 20 bp, synthetic construct
  source 1..20: mol_type = other DNA
cagcaagacctagagactag

SEQ ID NO: 293523 - DNA, 20 bp, synthetic construct
  source 1..20: mol_type = other DNA
acagcaagacctagagacta

SEQ ID NO: 293524 - DNA, 20 bp, synthetic construct
  source 1..20: mol_type = other DNA
cacagcaagacctagagact

SEQ ID NO: 293525 - DNA, 20 bp, synthetic construct
  source 1..20: mol_type = other DNA
ccacagcaagacctagagac

SEQ ID NO: 293526 - DNA, 20 bp, synthetic construct
  source 1..20: mol_type = other DNA
cccacagcaagacctagaga

SEQ ID NO: 293527 - DNA, 20 bp, synthetic construct
  source 1..20: mol_type = other DNA
acccacagcaagacctagag

SEQ ID NO: 293528 - DNA, 20 bp, synthetic construct
  source 1..20: mol_type = other DNA
cacccacagcaagacctaga

SEQ ID NO: 293529 - DNA, 20 bp, synthetic construct
  source 1..20: mol_type = other DNA
acacccacagcaagacctag

SEQ ID NO: 293530 - DNA, 20 bp, synthetic construct
  source 1..20: mol_type = other DNA
gacacccacagcaagaccta

SEQ ID NO: 293531 - DNA, 20 bp, synthetic construct
  source 1..20: mol_type = other DNA
agacacccacagcaagacct

SEQ ID NO: 293532 - DNA, 20 bp, synthetic construct
  source 1..20: mol_type = other DNA
cagacacccacagcaagacc

SEQ ID NO: 293533 - DNA, 20 bp, synthetic construct
  source 1..20: mol_type = other DNA
acagacacccacagcaagac

SEQ ID NO: 293534 - DNA, 20 bp, synthetic construct
  source 1..20: mol_type = other DNA
cacagacacccacagcaaga

SEQ ID NO: 293535 - DNA, 20 bp, synthetic construct
  source 1..20: mol_type = other DNA
gcacagacacccacagcaag

SEQ ID NO: 293536 - DNA, 20 bp, synthetic construct
  source 1..20: mol_type = other DNA
tgcacagacacccacagcaa

SEQ ID NO: 293537 - DNA, 20 bp, synthetic construct
  source 1..20: mol_type = other DNA
ctgcacagacacccacagca

SEQ ID NO: 293538 - DNA, 20 bp, synthetic construct
  source 1..20: mol_type = other DNA
actgcacagacacccacagc

SEQ ID NO: 293539 - DNA, 20 bp, synthetic construct
  source 1..20: mol_type = other DNA
cactgcacagacacccacag

SEQ ID NO: 293540 - DNA, 20 bp, synthetic construct
  source 1..20: mol_type = other DNA
tcactgcacagacacccaca

SEQ ID NO: 293541 - DNA, 20 bp, synthetic construct
  source 1..20: mol_type = other DNA
ctcactgcacagacacccac

SEQ ID NO: 293542 - DNA, 20 bp, synthetic construct
  source 1..20: mol_type = other DNA
cctcactgcacagacaccca

SEQ ID NO: 293543 - DNA, 20 bp, synthetic construct
  source 1..20: mol_type = other DNA
ccctcactgcacagacaccc

SEQ ID NO: 293544 - DNA, 20 bp, synthetic construct
  source 1..20: mol_type = other DNA
accctcactgcacagacacc

SEQ ID NO: 293545 - DNA, 20 bp, synthetic construct
  source 1..20: mol_type = other DNA
caccctcactgcacagacac

SEQ ID NO: 293546 - DNA, 20 bp, synthetic construct
  source 1..20: mol_type = other DNA
acaccctcactgcacagaca

SEQ ID NO: 293547 - DNA, 20 bp, synthetic construct
  source 1..20: mol_type = other DNA
cacaccctcactgcacagac

SEQ ID NO: 293548 - DNA, 20 bp, synthetic construct
  source 1..20: mol_type = other DNA
acacaccctcactgcacaga

SEQ ID NO: 293549 - DNA, 20 bp, synthetic construct
  source 1..20: mol_type = other DNA
cacacaccctcactgcacag

SEQ ID NO: 293550 - DNA, 20 bp, synthetic construct
  source 1..20: mol_type = other DNA
acacacaccctcactgcaca

SEQ ID NO: 293551 - DNA, 20 bp, synthetic construct
  source 1..20: mol_type = other DNA
cacacacaccctcactgcac

SEQ ID NO: 293552 - DNA, 20 bp, synthetic construct
  source 1..20: mol_type = other DNA
ccacacacaccctcactgca

SEQ ID NO: 293553 - DNA, 20 bp, synthetic construct
  source 1..20: mol_type = other DNA
gccacacacaccctcactgc

SEQ ID NO: 293554 - DNA, 20 bp, synthetic construct
  source 1..20: mol_type = other DNA
cgccacacacaccctcactg

SEQ ID NO: 293555 - DNA, 20 bp, synthetic construct
  source 1..20: mol_type = other DNA
gcgccacacacaccctcact

SEQ ID NO: 293556 - DNA, 20 bp, synthetic construct
  source 1..20: mol_type = other DNA
agcgccacacacaccctcac

SEQ ID NO: 293557 - DNA, 20 bp, synthetic construct
  source 1..20: mol_type = other DNA
cagcgccacacacaccctca

SEQ ID NO: 293558 - DNA, 20 bp, synthetic construct
  source 1..20: mol_type = other DNA
ccagcgccacacacaccctc

SEQ ID NO: 293559 - DNA, 20 bp, synthetic construct
  source 1..20: mol_type = other DNA
cccagcgccacacacaccct

SEQ ID NO: 293560 - DNA, 20 bp, synthetic construct
  source 1..20: mol_type = other DNA
acccagcgccacacacaccc

SEQ ID NO: 293561 - DNA, 20 bp, synthetic construct
  source 1..20: mol_type = other DNA
cacccagcgccacacacacc

SEQ ID NO: 293562 - DNA, 20 bp, synthetic construct
  source 1..20: mol_type = other DNA
tcacccagcgccacacacac

SEQ ID NO: 293563 - DNA, 20 bp, synthetic construct
  source 1..20: mol_type = other DNA
ctcacccagcgccacacaca

SEQ ID NO: 293564 - DNA, 20 bp, synthetic construct
  source 1..20: mol_type = other DNA
gctcacccagcgccacacac

SEQ ID NO: 293565 - DNA, 20 bp, synthetic construct
  source 1..20: mol_type = other DNA
agctcacccagcgccacaca

SEQ ID NO: 293566 - DNA, 20 bp, synthetic construct
  source 1..20: mol_type = other DNA
gagctcacccagcgccacac

SEQ ID NO: 293567 - DNA, 20 bp, synthetic construct
  source 1..20: mol_type = other DNA
agagctcacccagcgccaca

SEQ ID NO: 293568 - DNA, 20 bp, synthetic construct
  source 1..20: mol_type = other DNA
cagagctcacccagcgccac

SEQ ID NO: 293569 - DNA, 20 bp, synthetic construct
  source 1..20: mol_type = other DNA
acagagctcacccagcgcca

SEQ ID NO: 293570 - DNA, 20 bp, synthetic construct
  source 1..20: mol_type = other DNA
gacagagctcacccagcgcc

SEQ ID NO: 293571 - DNA, 20 bp, synthetic construct
  source 1..20: mol_type = other DNA
agacagagctcacccagcgc

SEQ ID NO: 293572 - DNA, 20 bp, synthetic construct
  source 1..20: mol_type = other DNA
tagacagagctcacccagcg

SEQ ID NO: 293573 - DNA, 20 bp, synthetic construct
  source 1..20: mol_type = other DNA
ctagacagagctcacccagc

SEQ ID NO: 293574 - DNA, 20 bp, synthetic construct
  source 1..20: mol_type = other DNA
cctagacagagctcacccag

SEQ ID NO: 293575 - DNA, 20 bp, synthetic construct
  source 1..20: mol_type = other DNA
gcctagacagagctcaccca

SEQ ID NO: 293576 - DNA, 20 bp, synthetic construct
  source 1..20: mol_type = other DNA
ggcctagacagagctcaccc

SEQ ID NO: 293577 - DNA, 20 bp, synthetic construct
  source 1..20: mol_type = other DNA
aggcctagacagagctcacc

SEQ ID NO: 293578 - DNA, 20 bp, synthetic construct
  source 1..20: mol_type = other DNA
caggcctagacagagctcac

SEQ ID NO: 293579 - DNA, 20 bp, synthetic construct
  source 1..20: mol_type = other DNA
ccaggcctagacagagctca

SEQ ID NO: 293580 - DNA, 20 bp, synthetic construct
  source 1..20: mol_type = other DNA
gccaggcctagacagagctc

SEQ ID NO: 293581 - DNA, 20 bp, synthetic construct
  source 1..20: mol_type = other DNA
tgccaggcctagacagagct

SEQ ID NO: 293582 - DNA, 20 bp, synthetic construct
  source 1..20: mol_type = other DNA
gtgccaggcctagacagagc

SEQ ID NO: 293583 - DNA, 20 bp, synthetic construct
  source 1..20: mol_type = other DNA
tgtgccaggcctagacagag

SEQ ID NO: 293584 - DNA, 20 bp, synthetic construct
  source 1..20: mol_type = other DNA
ctgtgccaggcctagacaga

SEQ ID NO: 293585 - DNA, 20 bp, synthetic construct
  source 1..20: mol_type = other DNA
cctgtgccaggcctagacag

SEQ ID NO: 293586 - DNA, 20 bp, synthetic construct
  source 1..20: mol_type = other DNA
tcctgtgccaggcctagaca

SEQ ID NO: 293587 - DNA, 20 bp, synthetic construct
  source 1..20: mol_type = other DNA
atcctgtgccaggcctagac

SEQ ID NO: 293588 - DNA, 20 bp, synthetic construct
  source 1..20: mol_type = other DNA
catcctgtgccaggcctaga

SEQ ID NO: 293589 - DNA, 20 bp, synthetic construct
  source 1..20: mol_type = other DNA
gcatcctgtgccaggcctag

SEQ ID NO: 293590 - DNA, 20 bp, synthetic construct
  source 1..20: mol_type = other DNA
cgcatcctgtgccaggccta

SEQ ID NO: 293591 - DNA, 20 bp, synthetic construct
  source 1..20: mol_type = other DNA
ccgcatcctgtgccaggcct

SEQ ID NO: 293592 - DNA, 20 bp, synthetic construct
  source 1..20: mol_type = other DNA
accgcatcctgtgccaggcc

SEQ ID NO: 293593 - DNA, 20 bp, synthetic construct
  source 1..20: mol_type = other DNA
gaccgcatcctgtgccaggc

SEQ ID NO: 293594 - DNA, 20 bp, synthetic construct
  source 1..20: mol_type = other DNA
agaccgcatcctgtgccagg

SEQ ID NO: 293595 - DNA, 20 bp, synthetic construct
  source 1..20: mol_type = other DNA
cagaccgcatcctgtgccag

SEQ ID NO: 293596 - DNA, 20 bp, synthetic construct
  source 1..20: mol_type = other DNA
ccagaccgcatcctgtgcca

SEQ ID NO: 293597 - DNA, 20 bp, synthetic construct
  source 1..20: mol_type = other DNA
accagaccgcatcctgtgcc

SEQ ID NO: 293598 - DNA, 20 bp, synthetic construct
  source 1..20: mol_type = other DNA
taccagaccgcatcctgtgc

SEQ ID NO: 293599 - DNA, 20 bp, synthetic construct
  source 1..20: mol_type = other DNA
ctaccagaccgcatcctgtg

SEQ ID NO: 293600 - DNA, 20 bp, synthetic construct
  source 1..20: mol_type = other DNA
gctaccagaccgcatcctgt

SEQ ID NO: 293601 - DNA, 20 bp, synthetic construct
  source 1..20: mol_type = other DNA
agctaccagaccgcatcctg

SEQ ID NO: 293602 - DNA, 20 bp, synthetic construct
  source 1..20: mol_type = other DNA
cagctaccagaccgcatcct

SEQ ID NO: 293603 - DNA, 20 bp, synthetic construct
  source 1..20: mol_type = other DNA
gcagctaccagaccgcatcc

SEQ ID NO: 293604 - DNA, 20 bp, synthetic construct
  source 1..20: mol_type = other DNA
agcagctaccagaccgcatc

SEQ ID NO: 293605 - DNA, 20 bp, synthetic construct
  source 1..20: mol_type = other DNA
cagcagctaccagaccgcat

SEQ ID NO: 293606 - DNA, 20 bp, synthetic construct
  source 1..20: mol_type = other DNA
gcagcagctaccagaccgca

SEQ ID NO: 293607 - DNA, 20 bp, synthetic construct
  source 1..20: mol_type = other DNA
agcagcagctaccagaccgc

SEQ ID NO: 293608 - DNA, 20 bp, synthetic construct
  source 1..20: mol_type = other DNA
aagcagcagctaccagaccg

SEQ ID NO: 293609 - DNA, 20 bp, synthetic construct
  source 1..20: mol_type = other DNA
gaagcagcagctaccagacc

SEQ ID NO: 293610 - DNA, 20 bp, synthetic construct
  source 1..20: mol_type = other DNA
agaagcagcagctaccagac

SEQ ID NO: 293611 - DNA, 20 bp, synthetic construct
  source 1..20: mol_type = other DNA
gagaagcagcagctaccaga

SEQ ID NO: 293612 - DNA, 20 bp, synthetic construct
  source 1..20: mol_type = other DNA
agagaagcagcagctaccag

SEQ ID NO: 293613 - DNA, 20 bp, synthetic construct
  source 1..20: mol_type = other DNA
aagagaagcagcagctacca

SEQ ID NO: 293614 - DNA, 20 bp, synthetic construct
  source 1..20: mol_type = other DNA
gaagagaagcagcagctacc

SEQ ID NO: 293615 - DNA, 20 bp, synthetic construct
  source 1..20: mol_type = other DNA
agaagagaagcagcagctac

SEQ ID NO: 293616 - DNA, 20 bp, synthetic construct
  source 1..20: mol_type = other DNA
cagaagagaagcagcagcta

SEQ ID NO: 293617 - DNA, 20 bp, synthetic construct
  source 1..20: mol_type = other DNA
gcagaagagaagcagcagct

SEQ ID NO: 293618 - DNA, 20 bp, synthetic construct
  source 1..20: mol_type = other DNA
tgcagaagagaagcagcagc

SEQ ID NO: 293619 - DNA, 20 bp, synthetic construct
  source 1..20: mol_type = other DNA
ctgcagaagagaagcagcag

SEQ ID NO: 293620 - DNA, 20 bp, synthetic construct
  source 1..20: mol_type = other DNA
tctgcagaagagaagcagca

SEQ ID NO: 293621 - DNA, 20 bp, synthetic construct
  source 1..20: mol_type = other DNA
ttctgcagaagagaagcagc

SEQ ID NO: 293622 - DNA, 20 bp, synthetic construct
  source 1..20: mol_type = other DNA
cttctgcagaagagaagcag

SEQ ID NO: 293623 - DNA, 20 bp, synthetic construct
  source 1..20: mol_type = other DNA
gcttctgcagaagagaagca

SEQ ID NO: 293624 - DNA, 20 bp, synthetic construct
  source 1..20: mol_type = other DNA
cgcttctgcagaagagaagc

SEQ ID NO: 293625 - DNA, 20 bp, synthetic construct
  source 1..20: mol_type = other DNA
gcgcttctgcagaagagaag

SEQ ID NO: 293626 - DNA, 20 bp, synthetic construct
  source 1..20: mol_type = other DNA
tgcgcttctgcagaagagaa

SEQ ID NO: 293627 - DNA, 20 bp, synthetic construct
  source 1..20: mol_type = other DNA
ctgcgcttctgcagaagaga

SEQ ID NO: 293628 - DNA, 20 bp, synthetic construct
  source 1..20: mol_type = other DNA
gctgcgcttctgcagaagag

SEQ ID NO: 293629 - DNA, 20 bp, synthetic construct
  source 1..20: mol_type = other DNA
ggctgcgcttctgcagaaga

SEQ ID NO: 293630 - DNA, 20 bp, synthetic construct
  source 1..20: mol_type = other DNA
tggctgcgcttctgcagaag

SEQ ID NO: 293631 - DNA, 20 bp, synthetic construct
  source 1..20: mol_type = other DNA
ttggctgcgcttctgcagaa

SEQ ID NO: 293632 - DNA, 20 bp, synthetic construct
  source 1..20: mol_type = other DNA
cttggctgcgcttctgcaga

SEQ ID NO: 293633 - DNA, 20 bp, synthetic construct
  source 1..20: mol_type = other DNA
gcttggctgcgcttctgcag

SEQ ID NO: 293634 - DNA, 20 bp, synthetic construct
  source 1..20: mol_type = other DNA
tgcttggctgcgcttctgca

SEQ ID NO: 293635 - DNA, 20 bp, synthetic construct
  source 1..20: mol_type = other DNA
gtgcttggctgcgcttctgc

SEQ ID NO: 293636 - DNA, 20 bp, synthetic construct
  source 1..20: mol_type = other DNA
ggtgcttggctgcgcttctg

SEQ ID NO: 293637 - DNA, 20 bp, synthetic construct
  source 1..20: mol_type = other DNA
gggtgcttggctgcgcttct

SEQ ID NO: 293638 - DNA, 20 bp, synthetic construct
  source 1..20: mol_type = other DNA
agggtgcttggctgcgcttc

SEQ ID NO: 293639 - DNA, 20 bp, synthetic construct
  source 1..20: mol_type = other DNA
gagggtgcttggctgcgctt

SEQ ID NO: 293640 - DNA, 20 bp, synthetic construct
  source 1..20: mol_type = other DNA
agagggtgcttggctgcgct

SEQ ID NO: 293641 - DNA, 20 bp, synthetic construct
  source 1..20: mol_type = other DNA
cagagggtgcttggctgcgc

SEQ ID NO: 293642 - DNA, 20 bp, synthetic construct
  source 1..20: mol_type = other DNA
ccagagggtgcttggctgcg

SEQ ID NO: 293643 - DNA, 20 bp, synthetic construct
  source 1..20: mol_type = other DNA
cccagagggtgcttggctgc

SEQ ID NO: 293644 - DNA, 20 bp, synthetic construct
  source 1..20: mol_type = other DNA
ccccagagggtgcttggctg

SEQ ID NO: 293645 - DNA, 20 bp, synthetic construct
  source 1..20: mol_type = other DNA
accccagagggtgcttggct

SEQ ID NO: 293646 - DNA, 20 bp, synthetic construct
  source 1..20: mol_type = other DNA
aaccccagagggtgcttggc

SEQ ID NO: 293647 - DNA, 20 bp, synthetic construct
  source 1..20: mol_type = other DNA
aaaccccagagggtgcttgg

SEQ ID NO: 293648 - DNA, 20 bp, synthetic construct
  source 1..20: mol_type = other DNA
gaaaccccagagggtgcttg

SEQ ID NO: 293649 - DNA, 20 bp, synthetic construct
  source 1..20: mol_type = other DNA
tgaaaccccagagggtgctt

SEQ ID NO: 293650 - DNA, 20 bp, synthetic construct
  source 1..20: mol_type = other DNA
ctgaaaccccagagggtgct

SEQ ID NO: 293651 - DNA, 20 bp, synthetic construct
  source 1..20: mol_type = other DNA
cctgaaaccccagagggtgc

SEQ ID NO: 293652 - DNA, 20 bp, synthetic construct
  source 1..20: mol_type = other DNA
gcctgaaaccccagagggtg

SEQ ID NO: 293653 - DNA, 20 bp, synthetic construct
  source 1..20: mol_type = other DNA
ggcctgaaaccccagagggt

SEQ ID NO: 293654 - DNA, 20 bp, synthetic construct
  source 1..20: mol_type = other DNA
gggcctgaaaccccagaggg

SEQ ID NO: 293655 - DNA, 20 bp, synthetic construct
  source 1..20: mol_type = other DNA
tgggcctgaaaccccagagg

SEQ ID NO: 293656 - DNA, 20 bp, synthetic construct
  source 1..20: mol_type = other DNA
gtgggcctgaaaccccagag

SEQ ID NO: 293657 - DNA, 20 bp, synthetic construct
  source 1..20: mol_type = other DNA
tgtgggcctgaaaccccaga

SEQ ID NO: 293658 - DNA, 20 bp, synthetic construct
  source 1..20: mol_type = other DNA
gtgtgggcctgaaaccccag

SEQ ID NO: 293659 - DNA, 20 bp, synthetic construct
  source 1..20: mol_type = other DNA
ggtgtgggcctgaaacccca

SEQ ID NO: 293660 - DNA, 20 bp, synthetic construct
  source 1..20: mol_type = other DNA
gggtgtgggcctgaaacccc

SEQ ID NO: 293661 - DNA, 20 bp, synthetic construct
  source 1..20: mol_type = other DNA
tgggtgtgggcctgaaaccc

SEQ ID NO: 293662 - DNA, 20 bp, synthetic construct
  source 1..20: mol_type = other DNA
ctgggtgtgggcctgaaacc

SEQ ID NO: 293663 - DNA, 20 bp, synthetic construct
  source 1..20: mol_type = other DNA
gctgggtgtgggcctgaaac

SEQ ID NO: 293664 - DNA, 20 bp, synthetic construct
  source 1..20: mol_type = other DNA
ggctgggtgtgggcctgaaa

SEQ ID NO: 293665 - DNA, 20 bp, synthetic construct
  source 1..20: mol_type = other DNA
aggctgggtgtgggcctgaa

SEQ ID NO: 293666 - DNA, 20 bp, synthetic construct
  source 1..20: mol_type = other DNA
caggctgggtgtgggcctga

SEQ ID NO: 293667 - DNA, 20 bp, synthetic construct
  source 1..20: mol_type = other DNA
tcaggctgggtgtgggcctg

SEQ ID NO: 293668 - DNA, 20 bp, synthetic construct
  source 1..20: mol_type = other DNA
ttcaggctgggtgtgggcct

SEQ ID NO: 293669 - DNA, 20 bp, synthetic construct
  source 1..20: mol_type = other DNA
cttcaggctgggtgtgggcc

SEQ ID NO: 293670 - DNA, 20 bp, synthetic construct
  source 1..20: mol_type = other DNA
acttcaggctgggtgtgggc

SEQ ID NO: 293671 - DNA, 20 bp, synthetic construct
  source 1..20: mol_type = other DNA
aacttcaggctgggtgtggg

SEQ ID NO: 293672 - DNA, 20 bp, synthetic construct
  source 1..20: mol_type = other DNA
gaacttcaggctgggtgtgg

SEQ ID NO: 293673 - DNA, 20 bp, synthetic construct
  source 1..20: mol_type = other DNA
agaacttcaggctgggtgtg

SEQ ID NO: 293674 - DNA, 20 bp, synthetic construct
  source 1..20: mol_type = other DNA
cagaacttcaggctgggtgt

SEQ ID NO: 293675 - DNA, 20 bp, synthetic construct
  source 1..20: mol_type = other DNA
ccagaacttcaggctgggtg

SEQ ID NO: 293676 - DNA, 20 bp, synthetic construct
  source 1..20: mol_type = other DNA
cccagaacttcaggctgggt

SEQ ID NO: 293677 - DNA, 20 bp, synthetic construct
  source 1..20: mol_type = other DNA
tcccagaacttcaggctggg

SEQ ID NO: 293678 - DNA, 20 bp, synthetic construct
  source 1..20: mol_type = other DNA
ctcccagaacttcaggctgg

SEQ ID NO: 293679 - DNA, 20 bp, synthetic construct
  source 1..20: mol_type = other DNA
actcccagaacttcaggctg

SEQ ID NO: 293680 - DNA, 20 bp, synthetic construct
  source 1..20: mol_type = other DNA
cactcccagaacttcaggct

SEQ ID NO: 293681 - DNA, 20 bp, synthetic construct
  source 1..20: mol_type = other DNA
ccactcccagaacttcaggc

SEQ ID NO: 293682 - DNA, 20 bp, synthetic construct
  source 1..20: mol_type = other DNA
gccactcccagaacttcagg

SEQ ID NO: 293683 - DNA, 20 bp, synthetic construct
  source 1..20: mol_type = other DNA
agccactcccagaacttcag

SEQ ID NO: 293684 - DNA, 20 bp, synthetic construct
  source 1..20: mol_type = other DNA
gagccactcccagaacttca

SEQ ID NO: 293685 - DNA, 20 bp, synthetic construct
  source 1..20: mol_type = other DNA
tgagccactcccagaacttc

SEQ ID NO: 293686 - DNA, 20 bp, synthetic construct
  source 1..20: mol_type = other DNA
gtgagccactcccagaactt

SEQ ID NO: 293687 - DNA, 20 bp, synthetic construct
  source 1..20: mol_type = other DNA
agtgagccactcccagaact

SEQ ID NO: 293688 - DNA, 20 bp, synthetic construct
  source 1..20: mol_type = other DNA
aagtgagccactcccagaac

SEQ ID NO: 293689 - DNA, 20 bp, synthetic construct
  source 1..20: mol_type = other DNA
aaagtgagccactcccagaa

SEQ ID NO: 293690 - DNA, 20 bp, synthetic construct
  source 1..20: mol_type = other DNA
gaaagtgagccactcccaga

SEQ ID NO: 293691 - DNA, 20 bp, synthetic construct
  source 1..20: mol_type = other DNA
ggaaagtgagccactcccag

SEQ ID NO: 293692 - DNA, 20 bp, synthetic construct
  source 1..20: mol_type = other DNA
tggaaagtgagccactccca

SEQ ID NO: 293693 - DNA, 20 bp, synthetic construct
  source 1..20: mol_type = other DNA
ttggaaagtgagccactccc

SEQ ID NO: 293694 - DNA, 20 bp, synthetic construct
  source 1..20: mol_type = other DNA
gttggaaagtgagccactcc

SEQ ID NO: 293695 - DNA, 20 bp, synthetic construct
  source 1..20: mol_type = other DNA
ggttggaaagtgagccactc

SEQ ID NO: 293696 - DNA, 20 bp, synthetic construct
  source 1..20: mol_type = other DNA
aggttggaaagtgagccact

SEQ ID NO: 293697 - DNA, 20 bp, synthetic construct
  source 1..20: mol_type = other DNA
aaggttggaaagtgagccac

SEQ ID NO: 293698 - DNA, 20 bp, synthetic construct
  source 1..20: mol_type = other DNA
gaaggttggaaagtgagcca

SEQ ID NO: 293699 - DNA, 20 bp, synthetic construct
  source 1..20: mol_type = other DNA
tgaaggttggaaagtgagcc

SEQ ID NO: 293700 - DNA, 20 bp, synthetic construct
  source 1..20: mol_type = other DNA
ctgaaggttggaaagtgagc

SEQ ID NO: 293701 - DNA, 20 bp, synthetic construct
  source 1..20: mol_type = other DNA
cctgaaggttggaaagtgag

SEQ ID NO: 293702 - DNA, 20 bp, synthetic construct
  source 1..20: mol_type = other DNA
ccctgaaggttggaaagtga

SEQ ID NO: 293703 - DNA, 20 bp, synthetic construct
  source 1..20: mol_type = other DNA
accctgaaggttggaaagtg

SEQ ID NO: 293704 - DNA, 20 bp, synthetic construct
  source 1..20: mol_type = other DNA
gaccctgaaggttggaaagt

SEQ ID NO: 293705 - DNA, 20 bp, synthetic construct
  source 1..20: mol_type = other DNA
agaccctgaaggttggaaag

SEQ ID NO: 293706 - DNA, 20 bp, synthetic construct
  source 1..20: mol_type = other DNA
gagaccctgaaggttggaaa

SEQ ID NO: 293707 - DNA, 20 bp, synthetic construct
  source 1..20: mol_type = other DNA
ggagaccctgaaggttggaa

SEQ ID NO: 293708 - DNA, 20 bp, synthetic construct
  source 1..20: mol_type = other DNA
gggagaccctgaaggttgga

SEQ ID NO: 293709 - DNA, 20 bp, synthetic construct
  source 1..20: mol_type = other DNA
tgggagaccctgaaggttgg

SEQ ID NO: 293710 - DNA, 20 bp, synthetic construct
  source 1..20: mol_type = other DNA
ctgggagaccctgaaggttg

SEQ ID NO: 293711 - DNA, 20 bp, synthetic construct
  source 1..20: mol_type = other DNA
gctgggagaccctgaaggtt

SEQ ID NO: 293712 - DNA, 20 bp, synthetic construct
  source 1..20: mol_type = other DNA
tgctgggagaccctgaaggt

SEQ ID NO: 293713 - DNA, 20 bp, synthetic construct
  source 1..20: mol_type = other DNA
ctgctgggagaccctgaagg

SEQ ID NO: 293714 - DNA, 20 bp, synthetic construct
  source 1..20: mol_type = other DNA
gctgctgggagaccctgaag

SEQ ID NO: 293715 - DNA, 20 bp, synthetic construct
  source 1..20: mol_type = other DNA
agctgctgggagaccctgaa

SEQ ID NO: 293716 - DNA, 20 bp, synthetic construct
  source 1..20: mol_type = other DNA
cagctgctgggagaccctga

SEQ ID NO: 293717 - DNA, 20 bp, synthetic construct
  source 1..20: mol_type = other DNA
tcagctgctgggagaccctg

SEQ ID NO: 293718 - DNA, 20 bp, synthetic construct
  source 1..20: mol_type = other DNA
gtcagctgctgggagaccct

SEQ ID NO: 293719 - DNA, 20 bp, synthetic construct
  source 1..20: mol_type = other DNA
agtcagctgctgggagaccc

SEQ ID NO: 293720 - DNA, 20 bp, synthetic construct
  source 1..20: mol_type = other DNA
cagtcagctgctgggagacc

SEQ ID NO: 293721 - DNA, 20 bp, synthetic construct
  source 1..20: mol_type = other DNA
ccagtcagctgctgggagac

SEQ ID NO: 293722 - DNA, 20 bp, synthetic construct
  source 1..20: mol_type = other DNA
cccagtcagctgctgggaga

SEQ ID NO: 293723 - DNA, 20 bp, synthetic construct
  source 1..20: mol_type = other DNA
ccccagtcagctgctgggag

SEQ ID NO: 293724 - DNA, 20 bp, synthetic construct
  source 1..20: mol_type = other DNA
tccccagtcagctgctggga

SEQ ID NO: 293725 - DNA, 20 bp, synthetic construct
  source 1..20: mol_type = other DNA
ctccccagtcagctgctggg

SEQ ID NO: 293726 - DNA, 20 bp, synthetic construct
  source 1..20: mol_type = other DNA
actccccagtcagctgctgg

SEQ ID NO: 293727 - DNA, 20 bp, synthetic construct
  source 1..20: mol_type = other DNA
cactccccagtcagctgctg

SEQ ID NO: 293728 - DNA, 20 bp, synthetic construct
  source 1..20: mol_type = other DNA
ccactccccagtcagctgct

SEQ ID NO: 293729 - DNA, 20 bp, synthetic construct
  source 1..20: mol_type = other DNA
accactccccagtcagctgc

SEQ ID NO: 293730 - DNA, 20 bp, synthetic construct
  source 1..20: mol_type = other DNA
caccactccccagtcagctg

SEQ ID NO: 293731 - DNA, 20 bp, synthetic construct
  source 1..20: mol_type = other DNA
ccaccactccccagtcagct

SEQ ID NO: 293732 - DNA, 20 bp, synthetic construct
  source 1..20: mol_type = other DNA
tccaccactccccagtcagc

SEQ ID NO: 293733 - DNA, 20 bp, synthetic construct
  source 1..20: mol_type = other DNA
ctccaccactccccagtcag

SEQ ID NO: 293734 - DNA, 20 bp, synthetic construct
  source 1..20: mol_type = other DNA
cctccaccactccccagtca

SEQ ID NO: 293735 - DNA, 20 bp, synthetic construct
  source 1..20: mol_type = other DNA
ccctccaccactccccagtc

SEQ ID NO: 293736 - DNA, 20 bp, synthetic construct
  source 1..20: mol_type = other DNA
tccctccaccactccccagt

SEQ ID NO: 293737 - DNA, 20 bp, synthetic construct
  source 1..20: mol_type = other DNA
ttccctccaccactccccag

SEQ ID NO: 293738 - DNA, 20 bp, synthetic construct
  source 1..20: mol_type = other DNA
tttccctccaccactcccca

SEQ ID NO: 293739 - DNA, 20 bp, synthetic construct
  source 1..20: mol_type = other DNA
ttttccctccaccactcccc

SEQ ID NO: 293740 - DNA, 20 bp, synthetic construct
  source 1..20: mol_type = other DNA
cttttccctccaccactccc

SEQ ID NO: 293741 - DNA, 20 bp, synthetic construct
  source 1..20: mol_type = other DNA
ccttttccctccaccactcc

SEQ ID NO: 293742 - DNA, 20 bp, synthetic construct
  source 1..20: mol_type = other DNA
cccttttccctccaccactc

SEQ ID NO: 293743 - DNA, 20 bp, synthetic construct
  source 1..20: mol_type = other DNA
tcccttttccctccaccact

SEQ ID NO: 293744 - DNA, 20 bp, synthetic construct
  source 1..20: mol_type = other DNA
atcccttttccctccaccac

SEQ ID NO: 293745 - DNA, 20 bp, synthetic construct
  source 1..20: mol_type = other DNA
aatcccttttccctccacca

SEQ ID NO: 293746 - DNA, 20 bp, synthetic construct
  source 1..20: mol_type = other DNA
caatcccttttccctccacc

SEQ ID NO: 293747 - DNA, 20 bp, synthetic construct
  source 1..20: mol_type = other DNA
acaatcccttttccctccac

SEQ ID NO: 293748 - DNA, 20 bp, synthetic construct
  source 1..20: mol_type = other DNA
tacaatcccttttccctcca

SEQ ID NO: 293749 - DNA, 20 bp, synthetic construct
  source 1..20: mol_type = other DNA
atacaatcccttttccctcc

SEQ ID NO: 293750 - DNA, 20 bp, synthetic construct
  source 1..20: mol_type = other DNA
aatacaatcccttttccctc

SEQ ID NO: 293751 - DNA, 20 bp, synthetic construct
  source 1..20: mol_type = other DNA
taatacaatcccttttccct

SEQ ID NO: 293752 - DNA, 20 bp, synthetic construct
  source 1..20: mol_type = other DNA
ctaatacaatcccttttccc

SEQ ID NO: 293753 - DNA, 20 bp, synthetic construct
  source 1..20: mol_type = other DNA
actaatacaatcccttttcc

SEQ ID NO: 293754 - DNA, 20 bp, synthetic construct
  source 1..20: mol_type = other DNA
gactaatacaatcccttttc

SEQ ID NO: 293755 - DNA, 20 bp, synthetic construct
  source 1..20: mol_type = other DNA
ggactaatacaatccctttt

SEQ ID NO: 293756 - DNA, 20 bp, synthetic construct
  source 1..20: mol_type = other DNA
cggactaatacaatcccttt

SEQ ID NO: 293757 - DNA, 20 bp, synthetic construct
  source 1..20: mol_type = other DNA
acggactaatacaatccctt

SEQ ID NO: 293758 - DNA, 20 bp, synthetic construct
  source 1..20: mol_type = other DNA
aacggactaatacaatccct

SEQ ID NO: 293759 - DNA, 20 bp, synthetic construct
  source 1..20: mol_type = other DNA
aaacggactaatacaatccc

SEQ ID NO: 293760 - DNA, 20 bp, synthetic construct
  source 1..20: mol_type = other DNA
aaaacggactaatacaatcc

SEQ ID NO: 293761 - DNA, 20 bp, synthetic construct
  source 1..20: mol_type = other DNA
gaaaacggactaatacaatc

SEQ ID NO: 293762 - DNA, 20 bp, synthetic construct
  source 1..20: mol_type = other DNA
tgaaaacggactaatacaat

SEQ ID NO: 293763 - DNA, 20 bp, synthetic construct
  source 1..20: mol_type = other DNA
gtgaaaacggactaatacaa

SEQ ID NO: 293764 - DNA, 20 bp, synthetic construct
  source 1..20: mol_type = other DNA
cgtgaaaacggactaataca

SEQ ID NO: 293765 - DNA, 20 bp, synthetic construct
  source 1..20: mol_type = other DNA
gcgtgaaaacggactaatac

SEQ ID NO: 293766 - DNA, 20 bp, synthetic construct
  source 1..20: mol_type = other DNA
ggcgtgaaaacggactaata

SEQ ID NO: 293767 - DNA, 20 bp, synthetic construct
  source 1..20: mol_type = other DNA
cggcgtgaaaacggactaat

SEQ ID NO: 293768 - DNA, 20 bp, synthetic construct
  source 1..20: mol_type = other DNA
gcggcgtgaaaacggactaa

SEQ ID NO: 293769 - DNA, 20 bp, synthetic construct
  source 1..20: mol_type = other DNA
agcggcgtgaaaacggacta

SEQ ID NO: 293770 - DNA, 20 bp, synthetic construct
  source 1..20: mol_type = other DNA
cagcggcgtgaaaacggact

SEQ ID NO: 293771 - DNA, 20 bp, synthetic construct
  source 1..20: mol_type = other DNA
tcagcggcgtgaaaacggac

SEQ ID NO: 293772 - DNA, 20 bp, synthetic construct
  source 1..20: mol_type = other DNA
atcagcggcgtgaaaacgga

SEQ ID NO: 293773 - DNA, 20 bp, synthetic construct
  source 1..20: mol_type = other DNA
catcagcggcgtgaaaacgg

SEQ ID NO: 293774 - DNA, 20 bp, synthetic construct
  source 1..20: mol_type = other DNA
tcatcagcggcgtgaaaacg

SEQ ID NO: 293775 - DNA, 20 bp, synthetic construct
  source 1..20: mol_type = other DNA
ttcatcagcggcgtgaaaac

SEQ ID NO: 293776 - DNA, 20 bp, synthetic construct
  source 1..20: mol_type = other DNA
cttcatcagcggcgtgaaaa

SEQ ID NO: 293777 - DNA, 20 bp, synthetic construct
  source 1..20: mol_type = other DNA
tcttcatcagcggcgtgaaa

SEQ ID NO: 293778 - DNA, 20 bp, synthetic construct
  source 1..20: mol_type = other DNA
gtcttcatcagcggcgtgaa

SEQ ID NO: 293779 - DNA, 20 bp, synthetic construct
  source 1..20: mol_type = other DNA
tgtcttcatcagcggcgtga

SEQ ID NO: 293780 - DNA, 20 bp, synthetic construct
  source 1..20: mol_type = other DNA
atgtcttcatcagcggcgtg

SEQ ID NO: 293781 - DNA, 20 bp, synthetic construct
  source 1..20: mol_type = other DNA
tatgtcttcatcagcggcgt

SEQ ID NO: 293782 - DNA, 20 bp, synthetic construct
  source 1..20: mol_type = other DNA
gtatgtcttcatcagcggcg

SEQ ID NO: 293783 - DNA, 20 bp, synthetic construct
  source 1..20: mol_type = other DNA
ggtatgtcttcatcagcggc

SEQ ID NO: 293784 - DNA, 20 bp, synthetic construct
  source 1..20: mol_type = other DNA
gggtatgtcttcatcagcgg

SEQ ID NO: 293785 - DNA, 20 bp, synthetic construct
  source 1..20: mol_type = other DNA
cgggtatgtcttcatcagcg

SEQ ID NO: 293786 - DNA, 20 bp, synthetic construct
  source 1..20: mol_type = other DNA
tcgggtatgtcttcatcagc

SEQ ID NO: 293787 - DNA, 20 bp, synthetic construct
  source 1..20: mol_type = other DNA
atcgggtatgtcttcatcag

SEQ ID NO: 293788 - DNA, 20 bp, synthetic construct
  source 1..20: mol_type = other DNA
tatcgggtatgtcttcatca

SEQ ID NO: 293789 - DNA, 20 bp, synthetic construct
  source 1..20: mol_type = other DNA
gtatcgggtatgtcttcatc

SEQ ID NO: 293790 - DNA, 20 bp, synthetic construct
  source 1..20: mol_type = other DNA
agtatcgggtatgtcttcat

SEQ ID NO: 293791 - DNA, 20 bp, synthetic construct
  source 1..20: mol_type = other DNA
cagtatcgggtatgtcttca

SEQ ID NO: 293792 - DNA, 20 bp, synthetic construct
  source 1..20: mol_type = other DNA
ccagtatcgggtatgtcttc

SEQ ID NO: 293793 - DNA, 20 bp, synthetic construct
  source 1..20: mol_type = other DNA
cccagtatcgggtatgtctt

SEQ ID NO: 293794 - DNA, 20 bp, synthetic construct
  source 1..20: mol_type = other DNA
gcccagtatcgggtatgtct

SEQ ID NO: 293795 - DNA, 20 bp, synthetic construct
  source 1..20: mol_type = other DNA
tgcccagtatcgggtatgtc

SEQ ID NO: 293796 - DNA, 20 bp, synthetic construct
  source 1..20: mol_type = other DNA
ctgcccagtatcgggtatgt

SEQ ID NO: 293797 - DNA, 20 bp, synthetic construct
  source 1..20: mol_type = other DNA
actgcccagtatcgggtatg

SEQ ID NO: 293798 - DNA, 20 bp, synthetic construct
  source 1..20: mol_type = other DNA
gactgcccagtatcgggtat

SEQ ID NO: 293799 - DNA, 20 bp, synthetic construct
  source 1..20: mol_type = other DNA
agactgcccagtatcgggta

SEQ ID NO: 293800 - DNA, 20 bp, synthetic construct
  source 1..20: mol_type = other DNA
tagactgcccagtatcgggt

SEQ ID NO: 293801 - DNA, 20 bp, synthetic construct
  source 1..20: mol_type = other DNA
ttagactgcccagtatcggg

SEQ ID NO: 293802 - DNA, 20 bp, synthetic construct
  source 1..20: mol_type = other DNA
tttagactgcccagtatcgg

SEQ ID NO: 293803 - DNA, 20 bp, synthetic construct
  source 1..20: mol_type = other DNA
ttttagactgcccagtatcg

SEQ ID NO: 293804 - DNA, 20 bp, synthetic construct
  source 1..20: mol_type = other DNA
cttttagactgcccagtatc

SEQ ID NO: 293805 - DNA, 20 bp, synthetic construct
  source 1..20: mol_type = other DNA
tcttttagactgcccagtat

SEQ ID NO: 293806 - DNA, 20 bp, synthetic construct
  source 1..20: mol_type = other DNA
atcttttagactgcccagta

SEQ ID NO: 293807 - DNA, 20 bp, synthetic construct
  source 1..20: mol_type = other DNA
tatcttttagactgcccagt

SEQ ID NO: 293808 - DNA, 20 bp, synthetic construct
  source 1..20: mol_type = other DNA
ctatcttttagactgcccag

SEQ ID NO: 293809 - DNA, 20 bp, synthetic construct
  source 1..20: mol_type = other DNA
tctatcttttagactgccca

SEQ ID NO: 293810 - DNA, 20 bp, synthetic construct
  source 1..20: mol_type = other DNA
ctctatcttttagactgccc

SEQ ID NO: 293811 - DNA, 20 bp, synthetic construct
  source 1..20: mol_type = other DNA
cctctatcttttagactgcc

SEQ ID NO: 293812 - DNA, 20 bp, synthetic construct
  source 1..20: mol_type = other DNA
acctctatcttttagactgc

SEQ ID NO: 293813 - DNA, 20 bp, synthetic construct
  source 1..20: mol_type = other DNA
gacctctatcttttagactg

SEQ ID NO: 293814 - DNA, 20 bp, synthetic construct
  source 1..20: mol_type = other DNA
agacctctatcttttagact

SEQ ID NO: 293815 - DNA, 20 bp, synthetic construct
  source 1..20: mol_type = other DNA
cagacctctatcttttagac

SEQ ID NO: 293816 - DNA, 20 bp, synthetic construct
  source 1..20: mol_type = other DNA
tcagacctctatcttttaga

SEQ ID NO: 293817 - DNA, 20 bp, synthetic construct
  source 1..20: mol_type = other DNA
atcagacctctatcttttag

SEQ ID NO: 293818 - DNA, 20 bp, synthetic construct
  source 1..20: mol_type = other DNA
catcagacctctatctttta

SEQ ID NO: 293819 - DNA, 20 bp, synthetic construct
  source 1..20: mol_type = other DNA
ccatcagacctctatctttt

SEQ ID NO: 293820 - DNA, 20 bp, synthetic construct
  source 1..20: mol_type = other DNA
tccatcagacctctatcttt

SEQ ID NO: 293821 - DNA, 20 bp, synthetic construct
  source 1..20: mol_type = other DNA
gtccatcagacctctatctt

SEQ ID NO: 293822 - DNA, 20 bp, synthetic construct
  source 1..20: mol_type = other DNA
agtccatcagacctctatct

SEQ ID NO: 293823 - DNA, 20 bp, synthetic construct
  source 1..20: mol_type = other DNA
gagtccatcagacctctatc

SEQ ID NO: 293824 - DNA, 20 bp, synthetic construct
  source 1..20: mol_type = other DNA
tgagtccatcagacctctat

SEQ ID NO: 293825 - DNA, 20 bp, synthetic construct
  source 1..20: mol_type = other DNA
gtgagtccatcagacctcta

SEQ ID NO: 293826 - DNA, 20 bp, synthetic construct
  source 1..20: mol_type = other DNA
tgtgagtccatcagacctct

SEQ ID NO: 293827 - DNA, 20 bp, synthetic construct
  source 1..20: mol_type = other DNA
ctgtgagtccatcagacctc

SEQ ID NO: 293828 - DNA, 20 bp, synthetic construct
  source 1..20: mol_type = other DNA
actgtgagtccatcagacct

SEQ ID NO: 293829 - DNA, 20 bp, synthetic construct
  source 1..20: mol_type = other DNA
aactgtgagtccatcagacc

SEQ ID NO: 293830 - DNA, 20 bp, synthetic construct
  source 1..20: mol_type = other DNA
gaactgtgagtccatcagac

SEQ ID NO: 293831 - DNA, 20 bp, synthetic construct
  source 1..20: mol_type = other DNA
ggaactgtgagtccatcaga

SEQ ID NO: 293832 - DNA, 20 bp, synthetic construct
  source 1..20: mol_type = other DNA
tggaactgtgagtccatcag

SEQ ID NO: 293833 - DNA, 20 bp, synthetic construct
  source 1..20: mol_type = other DNA
gtggaactgtgagtccatca

SEQ ID NO: 293834 - DNA, 20 bp, synthetic construct
  source 1..20: mol_type = other DNA
cgtggaactgtgagtccatc

SEQ ID NO: 293835 - DNA, 20 bp, synthetic construct
  source 1..20: mol_type = other DNA
acgtggaactgtgagtccat

SEQ ID NO: 293836 - DNA, 20 bp, synthetic construct
  source 1..20: mol_type = other DNA
cacgtggaactgtgagtcca

SEQ ID NO: 293837 - DNA, 20 bp, synthetic construct
  source 1..20: mol_type = other DNA
tcacgtggaactgtgagtcc

SEQ ID NO: 293838 - DNA, 20 bp, synthetic construct
  source 1..20: mol_type = other DNA
gtcacgtggaactgtgagtc

SEQ ID NO: 293839 - DNA, 20 bp, synthetic construct
  source 1..20: mol_type = other DNA
agtcacgtggaactgtgagt

SEQ ID NO: 293840 - DNA, 20 bp, synthetic construct
  source 1..20: mol_type = other DNA
cagtcacgtggaactgtgag

SEQ ID NO: 293841 - DNA, 20 bp, synthetic construct
  source 1..20: mol_type = other DNA
ccagtcacgtggaactgtga

SEQ ID NO: 293842 - DNA, 20 bp, synthetic construct
  source 1..20: mol_type = other DNA
cccagtcacgtggaactgtg

SEQ ID NO: 293843 - DNA, 20 bp, synthetic construct
  source 1..20: mol_type = other DNA
ccccagtcacgtggaactgt

SEQ ID NO: 293844 - DNA, 20 bp, synthetic construct
  source 1..20: mol_type = other DNA
tccccagtcacgtggaactg

SEQ ID NO: 293845 - DNA, 20 bp, synthetic construct
  source 1..20: mol_type = other DNA
ctccccagtcacgtggaact

SEQ ID NO: 293846 - DNA, 20 bp, synthetic construct
  source 1..20: mol_type = other DNA
cctccccagtcacgtggaac

SEQ ID NO: 293847 - DNA, 20 bp, synthetic construct
  source 1..20: mol_type = other DNA
gcctccccagtcacgtggaa

SEQ ID NO: 293848 - DNA, 20 bp, synthetic construct
  source 1..20: mol_type = other DNA
ggcctccccagtcacgtgga

SEQ ID NO: 293849 - DNA, 20 bp, synthetic construct
  source 1..20: mol_type = other DNA
aggcctccccagtcacgtgg

SEQ ID NO: 293850 - DNA, 20 bp, synthetic construct
  source 1..20: mol_type = other DNA
caggcctccccagtcacgtg

SEQ ID NO: 293851 - DNA, 20 bp, synthetic construct
  source 1..20: mol_type = other DNA
tcaggcctccccagtcacgt

SEQ ID NO: 293852 - DNA, 20 bp, synthetic construct
  source 1..20: mol_type = other DNA
gtcaggcctccccagtcacg

SEQ ID NO: 293853 - DNA, 20 bp, synthetic construct
  source 1..20: mol_type = other DNA
tgtcaggcctccccagtcac

SEQ ID NO: 293854 - DNA, 20 bp, synthetic construct
  source 1..20: mol_type = other DNA
ttgtcaggcctccccagtca

SEQ ID NO: 293855 - DNA, 20 bp, synthetic construct
  source 1..20: mol_type = other DNA
attgtcaggcctccccagtc

SEQ ID NO: 293856 - DNA, 20 bp, synthetic construct
  source 1..20: mol_type = other DNA
gattgtcaggcctccccagt

SEQ ID NO: 293857 - DNA, 20 bp, synthetic construct
  source 1..20: mol_type = other DNA
tgattgtcaggcctccccag

SEQ ID NO: 293858 - DNA, 20 bp, synthetic construct
  source 1..20: mol_type = other DNA
atgattgtcaggcctcccca

SEQ ID NO: 293859 - DNA, 20 bp, synthetic construct
  source 1..20: mol_type = other DNA
catgattgtcaggcctcccc

SEQ ID NO: 293860 - DNA, 20 bp, synthetic construct
  source 1..20: mol_type = other DNA
ccatgattgtcaggcctccc

SEQ ID NO: 293861 - DNA, 20 bp, synthetic construct
  source 1..20: mol_type = other DNA
accatgattgtcaggcctcc

SEQ ID NO: 293862 - DNA, 20 bp, synthetic construct
  source 1..20: mol_type = other DNA
caccatgattgtcaggcctc

SEQ ID NO: 293863 - DNA, 20 bp, synthetic construct
  source 1..20: mol_type = other DNA
ccaccatgattgtcaggcct

SEQ ID NO: 293864 - DNA, 20 bp, synthetic construct
  source 1..20: mol_type = other DNA
tccaccatgattgtcaggcc

SEQ ID NO: 293865 - DNA, 20 bp, synthetic construct
  source 1..20: mol_type = other DNA
ttccaccatgattgtcaggc

SEQ ID NO: 293866 - DNA, 20 bp, synthetic construct
  source 1..20: mol_type = other DNA
cttccaccatgattgtcagg

SEQ ID NO: 293867 - DNA, 20 bp, synthetic construct
  source 1..20: mol_type = other DNA
ccttccaccatgattgtcag

SEQ ID NO: 293868 - DNA, 20 bp, synthetic construct
  source 1..20: mol_type = other DNA
accttccaccatgattgtca

SEQ ID NO: 293869 - DNA, 20 bp, synthetic construct
  source 1..20: mol_type = other DNA
caccttccaccatgattgtc

SEQ ID NO: 293870 - DNA, 20 bp, synthetic construct
  source 1..20: mol_type = other DNA
tcaccttccaccatgattgt

SEQ ID NO: 293871 - DNA, 20 bp, synthetic construct
  source 1..20: mol_type = other DNA
ttcaccttccaccatgattg

SEQ ID NO: 293872 - DNA, 20 bp, synthetic construct
  source 1..20: mol_type = other DNA
tttcaccttccaccatgatt

SEQ ID NO: 293873 - DNA, 20 bp, synthetic construct
  source 1..20: mol_type = other DNA
ctttcaccttccaccatgat

SEQ ID NO: 293874 - DNA, 20 bp, synthetic construct
  source 1..20: mol_type = other DNA
cctttcaccttccaccatga

SEQ ID NO: 293875 - DNA, 20 bp, synthetic construct
  source 1..20: mol_type = other DNA
gcctttcaccttccaccatg

SEQ ID NO: 293876 - DNA, 20 bp, synthetic construct
  source 1..20: mol_type = other DNA
agcctttcaccttccaccat

SEQ ID NO: 293877 - DNA, 20 bp, synthetic construct
  source 1..20: mol_type = other DNA
aagcctttcaccttccacca

SEQ ID NO: 293878 - DNA, 20 bp, synthetic construct
  source 1..20: mol_type = other DNA
caagcctttcaccttccacc

SEQ ID NO: 293879 - DNA, 20 bp, synthetic construct
  source 1..20: mol_type = other DNA
acaagcctttcaccttccac

SEQ ID NO: 293880 - DNA, 20 bp, synthetic construct
  source 1..20: mol_type = other DNA
gacaagcctttcaccttcca

SEQ ID NO: 293881 - DNA, 20 bp, synthetic construct
  source 1..20: mol_type = other DNA
agacaagcctttcaccttcc

SEQ ID NO: 293882 - DNA, 20 bp, synthetic construct
  source 1..20: mol_type = other DNA
gagacaagcctttcaccttc

SEQ ID NO: 293883 - DNA, 20 bp, synthetic construct
  source 1..20: mol_type = other DNA
tgagacaagcctttcacctt

SEQ ID NO: 293884 - DNA, 20 bp, synthetic construct
  source 1..20: mol_type = other DNA
gtgagacaagcctttcacct

SEQ ID NO: 293885 - DNA, 20 bp, synthetic construct
  source 1..20: mol_type = other DNA
tgtgagacaagcctttcacc

SEQ ID NO: 293886 - DNA, 20 bp, synthetic construct
  source 1..20: mol_type = other DNA
gtgtgagacaagcctttcac

SEQ ID NO: 293887 - DNA, 20 bp, synthetic construct
  source 1..20: mol_type = other DNA
cgtgtgagacaagcctttca

SEQ ID NO: 293888 - DNA, 20 bp, synthetic construct
  source 1..20: mol_type = other DNA
ccgtgtgagacaagcctttc

SEQ ID NO: 293889 - DNA, 20 bp, synthetic construct
  source 1..20: mol_type = other DNA
accgtgtgagacaagccttt

SEQ ID NO: 293890 - DNA, 20 bp, synthetic construct
  source 1..20: mol_type = other DNA
caccgtgtgagacaagcctt

SEQ ID NO: 293891 - DNA, 20 bp, synthetic construct
  source 1..20: mol_type = other DNA
ccaccgtgtgagacaagcct

SEQ ID NO: 293892 - DNA, 20 bp, synthetic construct
  source 1..20: mol_type = other DNA
gccaccgtgtgagacaagcc

SEQ ID NO: 293893 - DNA, 20 bp, synthetic construct
  source 1..20: mol_type = other DNA
tgccaccgtgtgagacaagc

SEQ ID NO: 293894 - DNA, 20 bp, synthetic construct
  source 1..20: mol_type = other DNA
ctgccaccgtgtgagacaag

SEQ ID NO: 293895 - DNA, 20 bp, synthetic construct
  source 1..20: mol_type = other DNA
tctgccaccgtgtgagacaa

SEQ ID NO: 293896 - DNA, 20 bp, synthetic construct
  source 1..20: mol_type = other DNA
gtctgccaccgtgtgagaca

SEQ ID NO: 293897 - DNA, 20 bp, synthetic construct
  source 1..20: mol_type = other DNA
tgtctgccaccgtgtgagac

SEQ ID NO: 293898 - DNA, 20 bp, synthetic construct
  source 1..20: mol_type = other DNA
ttgtctgccaccgtgtgaga

SEQ ID NO: 293899 - DNA, 20 bp, synthetic construct
  source 1..20: mol_type = other DNA
cttgtctgccaccgtgtgag

SEQ ID NO: 293900 - DNA, 20 bp, synthetic construct
  source 1..20: mol_type = other DNA
tcttgtctgccaccgtgtga

SEQ ID NO: 293901 - DNA, 20 bp, synthetic construct
  source 1..20: mol_type = other DNA
ctcttgtctgccaccgtgtg

SEQ ID NO: 293902 - DNA, 20 bp, synthetic construct
  source 1..20: mol_type = other DNA
tctcttgtctgccaccgtgt

SEQ ID NO: 293903 - DNA, 20 bp, synthetic construct
  source 1..20: mol_type = other DNA
ttctcttgtctgccaccgtg

SEQ ID NO: 293904 - DNA, 20 bp, synthetic construct
  source 1..20: mol_type = other DNA
tttctcttgtctgccaccgt

SEQ ID NO: 293905 - DNA, 20 bp, synthetic construct
  source 1..20: mol_type = other DNA
ttttctcttgtctgccaccg

SEQ ID NO: 293906 - DNA, 20 bp, synthetic construct
  source 1..20: mol_type = other DNA
cttttctcttgtctgccacc

SEQ ID NO: 293907 - DNA, 20 bp, synthetic construct
  source 1..20: mol_type = other DNA
tcttttctcttgtctgccac

SEQ ID NO: 293908 - DNA, 20 bp, synthetic construct
  source 1..20: mol_type = other DNA
ctcttttctcttgtctgcca

SEQ ID NO: 293909 - DNA, 20 bp, synthetic construct
  source 1..20: mol_type = other DNA
gctcttttctcttgtctgcc

SEQ ID NO: 293910 - DNA, 20 bp, synthetic construct
  source 1..20: mol_type = other DNA
agctcttttctcttgtctgc

SEQ ID NO: 293911 - DNA, 20 bp, synthetic construct
  source 1..20: mol_type = other DNA
aagctcttttctcttgtctg

SEQ ID NO: 293912 - DNA, 20 bp, synthetic construct
  source 1..20: mol_type = other DNA
caagctcttttctcttgtct

SEQ ID NO: 293913 - DNA, 20 bp, synthetic construct
  source 1..20: mol_type = other DNA
acaagctcttttctcttgtc

SEQ ID NO: 293914 - DNA, 20 bp, synthetic construct
  source 1..20: mol_type = other DNA
cacaagctcttttctcttgt

SEQ ID NO: 293915 - DNA, 20 bp, synthetic construct
  source 1..20: mol_type = other DNA
gcacaagctcttttctcttg

SEQ ID NO: 293916 - DNA, 20 bp, synthetic construct
  source 1..20: mol_type = other DNA
tgcacaagctcttttctctt

SEQ ID NO: 293917 - DNA, 20 bp, synthetic construct
  source 1..20: mol_type = other DNA
ctgcacaagctcttttctct

SEQ ID NO: 293918 - DNA, 20 bp, synthetic construct
  source 1..20: mol_type = other DNA
cctgcacaagctcttttctc

SEQ ID NO: 293919 - DNA, 20 bp, synthetic construct
  source 1..20: mol_type = other DNA
ccctgcacaagctcttttct

SEQ ID NO: 293920 - DNA, 20 bp, synthetic construct
  source 1..20: mol_type = other DNA
cccctgcacaagctcttttc

SEQ ID NO: 293921 - DNA, 20 bp, synthetic construct
  source 1..20: mol_type = other DNA
tcccctgcacaagctctttt

SEQ ID NO: 293922 - DNA, 20 bp, synthetic construct
  source 1..20: mol_type = other DNA
ttcccctgcacaagctcttt

SEQ ID NO: 293923 - DNA, 20 bp, synthetic construct
  source 1..20: mol_type = other DNA
gttcccctgcacaagctctt

SEQ ID NO: 293924 - DNA, 20 bp, synthetic construct
  source 1..20: mol_type = other DNA
agttcccctgcacaagctct

SEQ ID NO: 293925 - DNA, 20 bp, synthetic construct
  source 1..20: mol_type = other DNA
gagttcccctgcacaagctc

SEQ ID NO: 293926 - DNA, 20 bp, synthetic construct
  source 1..20: mol_type = other DNA
ggagttcccctgcacaagct

SEQ ID NO: 293927 - DNA, 20 bp, synthetic construct
  source 1..20: mol_type = other DNA
gggagttcccctgcacaagc

SEQ ID NO: 293928 - DNA, 20 bp, synthetic construct
  source 1..20: mol_type = other DNA
ggggagttcccctgcacaag

SEQ ID NO: 293929 - DNA, 20 bp, synthetic construct
  source 1..20: mol_type = other DNA
aggggagttcccctgcacaa

SEQ ID NO: 293930 - DNA, 20 bp, synthetic construct
  source 1..20: mol_type = other DNA
aaggggagttcccctgcaca

SEQ ID NO: 293931 - DNA, 20 bp, synthetic construct
  source 1..20: mol_type = other DNA
aaaggggagttcccctgcac

SEQ ID NO: 293932 - DNA, 20 bp, synthetic construct
  source 1..20: mol_type = other DNA
taaaggggagttcccctgca

SEQ ID NO: 293933 - DNA, 20 bp, synthetic construct
  source 1..20: mol_type = other DNA
ataaaggggagttcccctgc

SEQ ID NO: 293934 - DNA, 20 bp, synthetic construct
  source 1..20: mol_type = other DNA
tataaaggggagttcccctg

SEQ ID NO: 293935 - DNA, 20 bp, synthetic construct
  source 1..20: mol_type = other DNA
ttataaaggggagttcccct

SEQ ID NO: 293936 - DNA, 20 bp, synthetic construct
  source 1..20: mol_type = other DNA
tttataaaggggagttcccc

SEQ ID NO: 293937 - DNA, 20 bp, synthetic construct
  source 1..20: mol_type = other DNA
ttttataaaggggagttccc

SEQ ID NO: 293938 - DNA, 20 bp, synthetic construct
  source 1..20: mol_type = other DNA
gttttataaaggggagttcc

SEQ ID NO: 293939 - DNA, 20 bp, synthetic construct
  source 1..20: mol_type = other DNA
ggttttataaaggggagttc

SEQ ID NO: 293940 - DNA, 20 bp, synthetic construct
  source 1..20: mol_type = other DNA
tggttttataaaggggagtt

SEQ ID NO: 293941 - DNA, 20 bp, synthetic construct
  source 1..20: mol_type = other DNA
atggttttataaaggggagt

SEQ ID NO: 293942 - DNA, 20 bp, synthetic construct
  source 1..20: mol_type = other DNA
gatggttttataaaggggag

SEQ ID NO: 293943 - DNA, 20 bp, synthetic construct
  source 1..20: mol_type = other DNA
tgatggttttataaagggga

SEQ ID NO: 293944 - DNA, 20 bp, synthetic construct
  source 1..20: mol_type = other DNA
ctgatggttttataaagggg

SEQ ID NO: 293945 - DNA, 20 bp, synthetic construct
  source 1..20: mol_type = other DNA
tctgatggttttataaaggg

SEQ ID NO: 293946 - DNA, 20 bp, synthetic construct
  source 1..20: mol_type = other DNA
atctgatggttttataaagg

SEQ ID NO: 293947 - DNA, 20 bp, synthetic construct
  source 1..20: mol_type = other DNA
gatctgatggttttataaag

SEQ ID NO: 293948 - DNA, 20 bp, synthetic construct
  source 1..20: mol_type = other DNA
agatctgatggttttataaa

SEQ ID NO: 293949 - DNA, 20 bp, synthetic construct
  source 1..20: mol_type = other DNA
gagatctgatggttttataa

SEQ ID NO: 293950 - DNA, 20 bp, synthetic construct
  source 1..20: mol_type = other DNA
cgagatctgatggttttata

SEQ ID NO: 293951 - DNA, 20 bp, synthetic construct
  source 1..20: mol_type = other DNA
ccgagatctgatggttttat

SEQ ID NO: 293952 - DNA, 20 bp, synthetic construct
  source 1..20: mol_type = other DNA
cccgagatctgatggtttta

SEQ ID NO: 293953 - DNA, 20 bp, synthetic construct
  source 1..20: mol_type = other DNA
tcccgagatctgatggtttt

SEQ ID NO: 293954 - DNA, 20 bp, synthetic construct
  source 1..20: mol_type = other DNA
ctcccgagatctgatggttt

SEQ ID NO: 293955 - DNA, 20 bp, synthetic construct
  source 1..20: mol_type = other DNA
tctcccgagatctgatggtt

SEQ ID NO: 293956 - DNA, 20 bp, synthetic construct
  source 1..20: mol_type = other DNA
gtctcccgagatctgatggt

SEQ ID NO: 293957 - DNA, 20 bp, synthetic construct
  source 1..20: mol_type = other DNA
agtctcccgagatctgatgg

SEQ ID NO: 293958 - DNA, 20 bp, synthetic construct
  source 1..20: mol_type = other DNA
aagtctcccgagatctgatg

SEQ ID NO: 293959 - DNA, 20 bp, synthetic construct
  source 1..20: mol_type = other DNA
taagtctcccgagatctgat

SEQ ID NO: 293960 - DNA, 20 bp, synthetic construct
  source 1..20: mol_type = other DNA
ataagtctcccgagatctga

SEQ ID NO: 293961 - DNA, 20 bp, synthetic construct
  source 1..20: mol_type = other DNA
aataagtctcccgagatctg

SEQ ID NO: 293962 - DNA, 20 bp, synthetic construct
  source 1..20: mol_type = other DNA
gaataagtctcccgagatct

SEQ ID NO: 293963 - DNA, 20 bp, synthetic construct
  source 1..20: mol_type = other DNA
tgaataagtctcccgagatc

SEQ ID NO: 293964 - DNA, 20 bp, synthetic construct
  source 1..20: mol_type = other DNA
gtgaataagtctcccgagat

SEQ ID NO: 293965 - DNA, 20 bp, synthetic construct
  source 1..20: mol_type = other DNA
agtgaataagtctcccgaga

SEQ ID NO: 293966 - DNA, 20 bp, synthetic construct
  source 1..20: mol_type = other DNA
tagtgaataagtctcccgag

SEQ ID NO: 293967 - DNA, 20 bp, synthetic construct
  source 1..20: mol_type = other DNA
atagtgaataagtctcccga

SEQ ID NO: 293968 - DNA, 20 bp, synthetic construct
  source 1..20: mol_type = other DNA
gatagtgaataagtctcccg

SEQ ID NO: 293969 - DNA, 20 bp, synthetic construct
  source 1..20: mol_type = other DNA
tgatagtgaataagtctccc

SEQ ID NO: 293970 - DNA, 20 bp, synthetic construct
  source 1..20: mol_type = other DNA
atgatagtgaataagtctcc

SEQ ID NO: 293971 - DNA, 20 bp, synthetic construct
  source 1..20: mol_type = other DNA
catgatagtgaataagtctc

SEQ ID NO: 293972 - DNA, 20 bp, synthetic construct
  source 1..20: mol_type = other DNA
tcatgatagtgaataagtct

SEQ ID NO: 293973 - DNA, 20 bp, synthetic construct
  source 1..20: mol_type = other DNA
ctcatgatagtgaataagtc

SEQ ID NO: 293974 - DNA, 20 bp, synthetic construct
  source 1..20: mol_type = other DNA
tctcatgatagtgaataagt

SEQ ID NO: 293975 - DNA, 20 bp, synthetic construct
  source 1..20: mol_type = other DNA
ttctcatgatagtgaataag

SEQ ID NO: 293976 - DNA, 20 bp, synthetic construct
  source 1..20: mol_type = other DNA
gttctcatgatagtgaataa

SEQ ID NO: 293977 - DNA, 20 bp, synthetic construct
  source 1..20: mol_type = other DNA
tgttctcatgatagtgaata

SEQ ID NO: 293978 - DNA, 20 bp, synthetic construct
  source 1..20: mol_type = other DNA
ctgttctcatgatagtgaat

SEQ ID NO: 293979 - DNA, 20 bp, synthetic construct
  source 1..20: mol_type = other DNA
gctgttctcatgatagtgaa

SEQ ID NO: 293980 - DNA, 20 bp, synthetic construct
  source 1..20: mol_type = other DNA
tgctgttctcatgatagtga

SEQ ID NO: 293981 - DNA, 20 bp, synthetic construct
  source 1..20: mol_type = other DNA
gtgctgttctcatgatagtg

SEQ ID NO: 293982 - DNA, 20 bp, synthetic construct
  source 1..20: mol_type = other DNA
cgtgctgttctcatgatagt

SEQ ID NO: 293983 - DNA, 20 bp, synthetic construct
  source 1..20: mol_type = other DNA
ccgtgctgttctcatgatag

SEQ ID NO: 293984 - DNA, 20 bp, synthetic construct
  source 1..20: mol_type = other DNA
cccgtgctgttctcatgata

SEQ ID NO: 293985 - DNA, 20 bp, synthetic construct
  source 1..20: mol_type = other DNA
tcccgtgctgttctcatgat

SEQ ID NO: 293986 - DNA, 20 bp, synthetic construct
  source 1..20: mol_type = other DNA
ttcccgtgctgttctcatga

SEQ ID NO: 293987 - DNA, 20 bp, synthetic construct
  source 1..20: mol_type = other DNA
tttcccgtgctgttctcatg

SEQ ID NO: 293988 - DNA, 20 bp, synthetic construct
  source 1..20: mol_type = other DNA
ctttcccgtgctgttctcat

SEQ ID NO: 293989 - DNA, 20 bp, synthetic construct
  source 1..20: mol_type = other DNA
tctttcccgtgctgttctca

SEQ ID NO: 293990 - DNA, 20 bp, synthetic construct
  source 1..20: mol_type = other DNA
gtctttcccgtgctgttctc

SEQ ID NO: 293991 - DNA, 20 bp, synthetic construct
  source 1..20: mol_type = other DNA
ggtctttcccgtgctgttct

SEQ ID NO: 293992 - DNA, 20 bp, synthetic construct
  source 1..20: mol_type = other DNA
gggtctttcccgtgctgttc

SEQ ID NO: 293993 - DNA, 20 bp, synthetic construct
  source 1..20: mol_type = other DNA
agggtctttcccgtgctgtt

SEQ ID NO: 293994 - DNA, 20 bp, synthetic construct
  source 1..20: mol_type = other DNA
gagggtctttcccgtgctgt

SEQ ID NO: 293995 - DNA, 20 bp, synthetic construct
  source 1..20: mol_type = other DNA
ggagggtctttcccgtgctg

SEQ ID NO: 293996 - DNA, 20 bp, synthetic construct
  source 1..20: mol_type = other DNA
aggagggtctttcccgtgct

SEQ ID NO: 293997 - DNA, 20 bp, synthetic construct
  source 1..20: mol_type = other DNA
gaggagggtctttcccgtgc

SEQ ID NO: 293998 - DNA, 20 bp, synthetic construct
  source 1..20: mol_type = other DNA
agaggagggtctttcccgtg

SEQ ID NO: 293999 - DNA, 20 bp, synthetic construct
  source 1..20: mol_type = other DNA
tagaggagggtctttcccgt

SEQ ID NO: 294000 - DNA, 20 bp, synthetic construct
  source 1..20: mol_type = other DNA
atagaggagggtctttcccg

SEQ ID NO: 294001 - DNA, 20 bp, synthetic construct
  source 1..20: mol_type = other DNA
catagaggagggtctttccc

SEQ ID NO: 294002 - DNA, 20 bp, synthetic construct
  source 1..20: mol_type = other DNA
tcatagaggagggtctttcc

SEQ ID NO: 294003 - DNA, 20 bp, synthetic construct
  source 1..20: mol_type = other DNA
atcatagaggagggtctttc

SEQ ID NO: 294004 - DNA, 20 bp, synthetic construct
  source 1..20: mol_type = other DNA
aatcatagaggagggtcttt

SEQ ID NO: 294005 - DNA, 20 bp, synthetic construct
  source 1..20: mol_type = other DNA
gaatcatagaggagggtctt

SEQ ID NO: 294006 - DNA, 20 bp, synthetic construct
  source 1..20: mol_type = other DNA
tgaatcatagaggagggtct

SEQ ID NO: 294007 - DNA, 20 bp, synthetic construct
  source 1..20: mol_type = other DNA
ttgaatcatagaggagggtc

SEQ ID NO: 294008 - DNA, 20 bp, synthetic construct
  source 1..20: mol_type = other DNA
attgaatcatagaggagggt

SEQ ID NO: 294009 - DNA, 20 bp, synthetic construct
  source 1..20: mol_type = other DNA
aattgaatcatagaggaggg

SEQ ID NO: 294010 - DNA, 20 bp, synthetic construct
  source 1..20: mol_type = other DNA
taattgaatcatagaggagg

SEQ ID NO: 294011 - DNA, 20 bp, synthetic construct
  source 1..20: mol_type = other DNA
gtaattgaatcatagaggag

SEQ ID NO: 294012 - DNA, 20 bp, synthetic construct
  source 1..20: mol_type = other DNA
ggtaattgaatcatagagga

SEQ ID NO: 294013 - DNA, 20 bp, synthetic construct
  source 1..20: mol_type = other DNA
aggtaattgaatcatagagg

SEQ ID NO: 294014 - DNA, 20 bp, synthetic construct
  source 1..20: mol_type = other DNA
gaggtaattgaatcatagag

SEQ ID NO: 294015 - DNA, 20 bp, synthetic construct
  source 1..20: mol_type = other DNA
ggaggtaattgaatcataga

SEQ ID NO: 294016 - DNA, 20 bp, synthetic construct
  source 1..20: mol_type = other DNA
gggaggtaattgaatcatag

SEQ ID NO: 294017 - DNA, 20 bp, synthetic construct
  source 1..20: mol_type = other DNA
tgggaggtaattgaatcata

SEQ ID NO: 294018 - DNA, 20 bp, synthetic construct
  source 1..20: mol_type = other DNA
gtgggaggtaattgaatcat

SEQ ID NO: 294019 - DNA, 20 bp, synthetic construct
  source 1..20: mol_type = other DNA
ggtgggaggtaattgaatca

SEQ ID NO: 294020 - DNA, 20 bp, synthetic construct
  source 1..20: mol_type = other DNA
tggtgggaggtaattgaatc

SEQ ID NO: 294021 - DNA, 20 bp, synthetic construct
  source 1..20: mol_type = other DNA
ctggtgggaggtaattgaat

SEQ ID NO: 294022 - DNA, 20 bp, synthetic construct
  source 1..20: mol_type = other DNA
cctggtgggaggtaattgaa

SEQ ID NO: 294023 - DNA, 20 bp, synthetic construct
  source 1..20: mol_type = other DNA
acctggtgggaggtaattga

SEQ ID NO: 294024 - DNA, 20 bp, synthetic construct
  source 1..20: mol_type = other DNA
gacctggtgggaggtaattg

SEQ ID NO: 294025 - DNA, 20 bp, synthetic construct
  source 1..20: mol_type = other DNA
ggacctggtgggaggtaatt

SEQ ID NO: 294026 - DNA, 20 bp, synthetic construct
  source 1..20: mol_type = other DNA
gggacctggtgggaggtaat

SEQ ID NO: 294027 - DNA, 20 bp, synthetic construct
  source 1..20: mol_type = other DNA
agggacctggtgggaggtaa

SEQ ID NO: 294028 - DNA, 20 bp, synthetic construct
  source 1..20: mol_type = other DNA
gagggacctggtgggaggta

SEQ ID NO: 294029 - DNA, 20 bp, synthetic construct
  source 1..20: mol_type = other DNA
ggagggacctggtgggaggt

SEQ ID NO: 294030 - DNA, 20 bp, synthetic construct
  source 1..20: mol_type = other DNA
gggagggacctggtgggagg

SEQ ID NO: 294031 - DNA, 20 bp, synthetic construct
  source 1..20: mol_type = other DNA
tgggagggacctggtgggag

SEQ ID NO: 294032 - DNA, 20 bp, synthetic construct
  source 1..20: mol_type = other DNA
gtgggagggacctggtggga

SEQ ID NO: 294033 - DNA, 20 bp, synthetic construct
  source 1..20: mol_type = other DNA
tgtgggagggacctggtggg

SEQ ID NO: 294034 - DNA, 20 bp, synthetic construct
  source 1..20: mol_type = other DNA
ttgtgggagggacctggtgg

SEQ ID NO: 294035 - DNA, 20 bp, synthetic construct
  source 1..20: mol_type = other DNA
gttgtgggagggacctggtg

SEQ ID NO: 294036 - DNA, 20 bp, synthetic construct
  source 1..20: mol_type = other DNA
tgttgtgggagggacctggt

SEQ ID NO: 294037 - DNA, 20 bp, synthetic construct
  source 1..20: mol_type = other DNA
atgttgtgggagggacctgg

SEQ ID NO: 294038 - DNA, 20 bp, synthetic construct
  source 1..20: mol_type = other DNA
catgttgtgggagggacctg

SEQ ID NO: 294039 - DNA, 20 bp, synthetic construct
  source 1..20: mol_type = other DNA
acatgttgtgggagggacct

SEQ ID NO: 294040 - DNA, 20 bp, synthetic construct
  source 1..20: mol_type = other DNA
tacatgttgtgggagggacc

SEQ ID NO: 294041 - DNA, 20 bp, synthetic construct
  source 1..20: mol_type = other DNA
ctacatgttgtgggagggac

SEQ ID NO: 294042 - DNA, 20 bp, synthetic construct
  source 1..20: mol_type = other DNA
cctacatgttgtgggaggga

SEQ ID NO: 294043 - DNA, 20 bp, synthetic construct
  source 1..20: mol_type = other DNA
tcctacatgttgtgggaggg

SEQ ID NO: 294044 - DNA, 20 bp, synthetic construct
  source 1..20: mol_type = other DNA
ttcctacatgttgtgggagg

SEQ ID NO: 294045 - DNA, 20 bp, synthetic construct
  source 1..20: mol_type = other DNA
attcctacatgttgtgggag

SEQ ID NO: 294046 - DNA, 20 bp, synthetic construct
  source 1..20: mol_type = other DNA
aattcctacatgttgtggga

SEQ ID NO: 294047 - DNA, 20 bp, synthetic construct
  source 1..20: mol_type = other DNA
caattcctacatgttgtggg

SEQ ID NO: 294048 - DNA, 20 bp, synthetic construct
  source 1..20: mol_type = other DNA
acaattcctacatgttgtgg

SEQ ID NO: 294049 - DNA, 20 bp, synthetic construct
  source 1..20: mol_type = other DNA
cacaattcctacatgttgtg

SEQ ID NO: 294050 - DNA, 20 bp, synthetic construct
  source 1..20: mol_type = other DNA
ccacaattcctacatgttgt

SEQ ID NO: 294051 - DNA, 20 bp, synthetic construct
  source 1..20: mol_type = other DNA
cccacaattcctacatgttg

SEQ ID NO: 294052 - DNA, 20 bp, synthetic construct
  source 1..20: mol_type = other DNA
tcccacaattcctacatgtt

SEQ ID NO: 294053 - DNA, 20 bp, synthetic construct
  source 1..20: mol_type = other DNA
ttcccacaattcctacatgt

SEQ ID NO: 294054 - DNA, 20 bp, synthetic construct
  source 1..20: mol_type = other DNA
gttcccacaattcctacatg

SEQ ID NO: 294055 - DNA, 20 bp, synthetic construct
  source 1..20: mol_type = other DNA
agttcccacaattcctacat

SEQ ID NO: 294056 - DNA, 20 bp, synthetic construct
  source 1..20: mol_type = other DNA
tagttcccacaattcctaca

SEQ ID NO: 294057 - DNA, 20 bp, synthetic construct
  source 1..20: mol_type = other DNA
gtagttcccacaattcctac

SEQ ID NO: 294058 - DNA, 20 bp, synthetic construct
  source 1..20: mol_type = other DNA
tgtagttcccacaattccta

SEQ ID NO: 294059 - DNA, 20 bp, synthetic construct
  source 1..20: mol_type = other DNA
ttgtagttcccacaattcct

SEQ ID NO: 294060 - DNA, 20 bp, synthetic construct
  source 1..20: mol_type = other DNA
attgtagttcccacaattcc

SEQ ID NO: 294061 - DNA, 20 bp, synthetic construct
  source 1..20: mol_type = other DNA
aattgtagttcccacaattc

SEQ ID NO: 294062 - DNA, 20 bp, synthetic construct
  source 1..20: mol_type = other DNA
gaattgtagttcccacaatt

SEQ ID NO: 294063 - DNA, 20 bp, synthetic construct
  source 1..20: mol_type = other DNA
tgaattgtagttcccacaat

SEQ ID NO: 294064 - DNA, 20 bp, synthetic construct
  source 1..20: mol_type = other DNA
ttgaattgtagttcccacaa

SEQ ID NO: 294065 - DNA, 20 bp, synthetic construct
  source 1..20: mol_type = other DNA
cttgaattgtagttcccaca

SEQ ID NO: 294066 - DNA, 20 bp, synthetic construct
  source 1..20: mol_type = other DNA
tcttgaattgtagttcccac

SEQ ID NO: 294067 - DNA, 20 bp, synthetic construct
  source 1..20: mol_type = other DNA
atcttgaattgtagttccca

SEQ ID NO: 294068 - DNA, 20 bp, synthetic construct
  source 1..20: mol_type = other DNA
catcttgaattgtagttccc

SEQ ID NO: 294069 - DNA, 20 bp, synthetic construct
  source 1..20: mol_type = other DNA
tcatcttgaattgtagttcc

SEQ ID NO: 294070 - DNA, 20 bp, synthetic construct
  source 1..20: mol_type = other DNA
gtcatcttgaattgtagttc

SEQ ID NO: 294071 - DNA, 20 bp, synthetic construct
  source 1..20: mol_type = other DNA
tgtcatcttgaattgtagtt

SEQ ID NO: 294072 - DNA, 20 bp, synthetic construct
  source 1..20: mol_type = other DNA
atgtcatcttgaattgtagt

SEQ ID NO: 294073 - DNA, 20 bp, synthetic construct
  source 1..20: mol_type = other DNA
aatgtcatcttgaattgtag

SEQ ID NO: 294074 - DNA, 20 bp, synthetic construct
  source 1..20: mol_type = other DNA
aaatgtcatcttgaattgta

SEQ ID NO: 294075 - DNA, 20 bp, synthetic construct
  source 1..20: mol_type = other DNA
caaatgtcatcttgaattgt

SEQ ID NO: 294076 - DNA, 20 bp, synthetic construct
  source 1..20: mol_type = other DNA
ccaaatgtcatcttgaattg

SEQ ID NO: 294077 - DNA, 20 bp, synthetic construct
  source 1..20: mol_type = other DNA
cccaaatgtcatcttgaatt

SEQ ID NO: 294078 - DNA, 20 bp, synthetic construct
  source 1..20: mol_type = other DNA
acccaaatgtcatcttgaat

SEQ ID NO: 294079 - DNA, 20 bp, synthetic construct
  source 1..20: mol_type = other DNA
cacccaaatgtcatcttgaa

SEQ ID NO: 294080 - DNA, 20 bp, synthetic construct
  source 1..20: mol_type = other DNA
ccacccaaatgtcatcttga

SEQ ID NO: 294081 - DNA, 20 bp, synthetic construct
  source 1..20: mol_type = other DNA
cccacccaaatgtcatcttg

SEQ ID NO: 294082 - DNA, 20 bp, synthetic construct
  source 1..20: mol_type = other DNA
ccccacccaaatgtcatctt

SEQ ID NO: 294083 - DNA, 20 bp, synthetic construct
  source 1..20: mol_type = other DNA
tccccacccaaatgtcatct

SEQ ID NO: 294084 - DNA, 20 bp, synthetic construct
  source 1..20: mol_type = other DNA
gtccccacccaaatgtcatc

SEQ ID NO: 294085 - DNA, 20 bp, synthetic construct
  source 1..20: mol_type = other DNA
tgtccccacccaaatgtcat

SEQ ID NO: 294086 - DNA, 20 bp, synthetic construct
  source 1..20: mol_type = other DNA
gtgtccccacccaaatgtca

SEQ ID NO: 294087 - DNA, 20 bp, synthetic construct
  source 1..20: mol_type = other DNA
tgtgtccccacccaaatgtc

SEQ ID NO: 294088 - DNA, 20 bp, synthetic construct
  source 1..20: mol_type = other DNA
ctgtgtccccacccaaatgt

SEQ ID NO: 294089 - DNA, 20 bp, synthetic construct
  source 1..20: mol_type = other DNA
gctgtgtccccacccaaatg

SEQ ID NO: 294090 - DNA, 20 bp, synthetic construct
  source 1..20: mol_type = other DNA
ggctgtgtccccacccaaat

SEQ ID NO: 294091 - DNA, 20 bp, synthetic construct
  source 1..20: mol_type = other DNA
tggctgtgtccccacccaaa

SEQ ID NO: 294092 - DNA, 20 bp, synthetic construct
  source 1..20: mol_type = other DNA
ttggctgtgtccccacccaa

SEQ ID NO: 294093 - DNA, 20 bp, synthetic construct
  source 1..20: mol_type = other DNA
tttggctgtgtccccaccca

SEQ ID NO: 294094 - DNA, 20 bp, synthetic construct
  source 1..20: mol_type = other DNA
gtttggctgtgtccccaccc

SEQ ID NO: 294095 - DNA, 20 bp, synthetic construct
  source 1..20: mol_type = other DNA
ggtttggctgtgtccccacc

SEQ ID NO: 294096 - DNA, 20 bp, synthetic construct
  source 1..20: mol_type = other DNA
tggtttggctgtgtccccac

SEQ ID NO: 294097 - DNA, 20 bp, synthetic construct
  source 1..20: mol_type = other DNA
atggtttggctgtgtcccca

SEQ ID NO: 294098 - DNA, 20 bp, synthetic construct
  source 1..20: mol_type = other DNA
tatggtttggctgtgtcccc

SEQ ID NO: 294099 - DNA, 20 bp, synthetic construct
  source 1..20: mol_type = other DNA
atatggtttggctgtgtccc

SEQ ID NO: 294100 - DNA, 20 bp, synthetic construct
  source 1..20: mol_type = other DNA
gatatggtttggctgtgtcc

SEQ ID NO: 294101 - DNA, 20 bp, synthetic construct
  source 1..20: mol_type = other DNA
tgatatggtttggctgtgtc

SEQ ID NO: 294102 - DNA, 20 bp, synthetic construct
  source 1..20: mol_type = other DNA
ctgatatggtttggctgtgt

SEQ ID NO: 294103 - DNA, 20 bp, synthetic construct
  source 1..20: mol_type = other DNA
cctgatatggtttggctgtg

SEQ ID NO: 294104 - DNA, 20 bp, synthetic construct
  source 1..20: mol_type = other DNA
ccctgatatggtttggctgt

SEQ ID NO: 294105 - DNA, 20 bp, synthetic construct
  source 1..20: mol_type = other DNA
gccctgatatggtttggctg

SEQ ID NO: 294106 - DNA, 20 bp, synthetic construct
  source 1..20: mol_type = other DNA
cgccctgatatggtttggct

SEQ ID NO: 294107 - DNA, 20 bp, synthetic construct
  source 1..20: mol_type = other DNA
acgccctgatatggtttggc

SEQ ID NO: 294108 - DNA, 20 bp, synthetic construct
  source 1..20: mol_type = other DNA
gacgccctgatatggtttgg

SEQ ID NO: 294109 - DNA, 20 bp, synthetic construct
  source 1..20: mol_type = other DNA
ggacgccctgatatggtttg

SEQ ID NO: 294110 - DNA, 20 bp, synthetic construct
  source 1..20: mol_type = other DNA
gggacgccctgatatggttt

SEQ ID NO: 294111 - DNA, 20 bp, synthetic construct
  source 1..20: mol_type = other DNA
tgggacgccctgatatggtt

SEQ ID NO: 294112 - DNA, 20 bp, synthetic construct
  source 1..20: mol_type = other DNA
ctgggacgccctgatatggt

SEQ ID NO: 294113 - DNA, 20 bp, synthetic construct
  source 1..20: mol_type = other DNA
tctgggacgccctgatatgg

SEQ ID NO: 294114 - DNA, 20 bp, synthetic construct
  source 1..20: mol_type = other DNA
ttctgggacgccctgatatg

SEQ ID NO: 294115 - DNA, 20 bp, synthetic construct
  source 1..20: mol_type = other DNA
tttctgggacgccctgatat

SEQ ID NO: 294116 - DNA, 20 bp, synthetic construct
  source 1..20: mol_type = other DNA
ctttctgggacgccctgata

SEQ ID NO: 294117 - DNA, 20 bp, synthetic construct
  source 1..20: mol_type = other DNA
cctttctgggacgccctgat

SEQ ID NO: 294118 - DNA, 20 bp, synthetic construct
  source 1..20: mol_type = other DNA
ccctttctgggacgccctga

SEQ ID NO: 294119 - DNA, 20 bp, synthetic construct
  source 1..20: mol_type = other DNA
accctttctgggacgccctg

SEQ ID NO: 294120 - DNA, 20 bp, synthetic construct
  source 1..20: mol_type = other DNA
taccctttctgggacgccct

SEQ ID NO: 294121 - DNA, 20 bp, synthetic construct
  source 1..20: mol_type = other DNA
ataccctttctgggacgccc

SEQ ID NO: 294122 - DNA, 20 bp, synthetic construct
  source 1..20: mol_type = other DNA
tataccctttctgggacgcc

SEQ ID NO: 294123 - DNA, 20 bp, synthetic construct
  source 1..20: mol_type = other DNA
ctataccctttctgggacgc

SEQ ID NO: 294124 - DNA, 20 bp, synthetic construct
  source 1..20: mol_type = other DNA
cctataccctttctgggacg

SEQ ID NO: 294125 - DNA, 20 bp, synthetic construct
  source 1..20: mol_type = other DNA
ccctataccctttctgggac

SEQ ID NO: 294126 - DNA, 20 bp, synthetic construct
  source 1..20: mol_type = other DNA
accctataccctttctggga

SEQ ID NO: 294127 - DNA, 20 bp, synthetic construct
  source 1..20: mol_type = other DNA
gaccctataccctttctggg

SEQ ID NO: 294128 - DNA, 20 bp, synthetic construct
  source 1..20: mol_type = other DNA
agaccctataccctttctgg

SEQ ID NO: 294129 - DNA, 20 bp, synthetic construct
  source 1..20: mol_type = other DNA
cagaccctataccctttctg

SEQ ID NO: 294130 - DNA, 20 bp, synthetic construct
  source 1..20: mol_type = other DNA
tcagaccctataccctttct

SEQ ID NO: 294131 - DNA, 20 bp, synthetic construct
  source 1..20: mol_type = other DNA
ctcagaccctataccctttc

SEQ ID NO: 294132 - DNA, 20 bp, synthetic construct
  source 1..20: mol_type = other DNA
tctcagaccctatacccttt

SEQ ID NO: 294133 - DNA, 20 bp, synthetic construct
  source 1..20: mol_type = other DNA
gtctcagaccctataccctt

SEQ ID NO: 294134 - DNA, 20 bp, synthetic construct
  source 1..20: mol_type = other DNA
ggtctcagaccctataccct

SEQ ID NO: 294135 - DNA, 20 bp, synthetic construct
  source 1..20: mol_type = other DNA
gggtctcagaccctataccc

SEQ ID NO: 294136 - DNA, 20 bp, synthetic construct
  source 1..20: mol_type = other DNA
tgggtctcagaccctatacc

SEQ ID NO: 294137 - DNA, 20 bp, synthetic construct
  source 1..20: mol_type = other DNA
ttgggtctcagaccctatac

SEQ ID NO: 294138 - DNA, 20 bp, synthetic construct
  source 1..20: mol_type = other DNA
cttgggtctcagaccctata

SEQ ID NO: 294139 - DNA, 20 bp, synthetic construct
  source 1..20: mol_type = other DNA
acttgggtctcagaccctat

SEQ ID NO: 294140 - DNA, 20 bp, synthetic construct
  source 1..20: mol_type = other DNA
gacttgggtctcagacccta

SEQ ID NO: 294141 - DNA, 20 bp, synthetic construct
  source 1..20: mol_type = other DNA
tgacttgggtctcagaccct

SEQ ID NO: 294142 - DNA, 20 bp, synthetic construct
  source 1..20: mol_type = other DNA
ctgacttgggtctcagaccc

SEQ ID NO: 294143 - DNA, 20 bp, synthetic construct
  source 1..20: mol_type = other DNA
gctgacttgggtctcagacc

SEQ ID NO: 294144 - DNA, 20 bp, synthetic construct
  source 1..20: mol_type = other DNA
tgctgacttgggtctcagac

SEQ ID NO: 294145 - DNA, 20 bp, synthetic construct
  source 1..20: mol_type = other DNA
atgctgacttgggtctcaga

SEQ ID NO: 294146 - DNA, 20 bp, synthetic construct
  source 1..20: mol_type = other DNA
catgctgacttgggtctcag

SEQ ID NO: 294147 - DNA, 20 bp, synthetic construct
  source 1..20: mol_type = other DNA
tcatgctgacttgggtctca

SEQ ID NO: 294148 - DNA, 20 bp, synthetic construct
  source 1..20: mol_type = other DNA
ctcatgctgacttgggtctc

SEQ ID NO: 294149 - DNA, 20 bp, synthetic construct
  source 1..20: mol_type = other DNA
tctcatgctgacttgggtct

SEQ ID NO: 294150 - DNA, 20 bp, synthetic construct
  source 1..20: mol_type = other DNA
ttctcatgctgacttgggtc

SEQ ID NO: 294151 - DNA, 20 bp, synthetic construct
  source 1..20: mol_type = other DNA
tttctcatgctgacttgggt

SEQ ID NO: 294152 - DNA, 20 bp, synthetic construct
  source 1..20: mol_type = other DNA
ctttctcatgctgacttggg

SEQ ID NO: 294153 - DNA, 20 bp, synthetic construct
  source 1..20: mol_type = other DNA
actttctcatgctgacttgg

SEQ ID NO: 294154 - DNA, 20 bp, synthetic construct
  source 1..20: mol_type = other DNA
tactttctcatgctgacttg

SEQ ID NO: 294155 - DNA, 20 bp, synthetic construct
  source 1..20: mol_type = other DNA
atactttctcatgctgactt

SEQ ID NO: 294156 - DNA, 20 bp, synthetic construct
  source 1..20: mol_type = other DNA
catactttctcatgctgact

SEQ ID NO: 294157 - DNA, 20 bp, synthetic construct
  source 1..20: mol_type = other DNA
gcatactttctcatgctgac

SEQ ID NO: 294158 - DNA, 20 bp, synthetic construct
  source 1..20: mol_type = other DNA
agcatactttctcatgctga

SEQ ID NO: 294159 - DNA, 20 bp, synthetic construct
  source 1..20: mol_type = other DNA
aagcatactttctcatgctg

SEQ ID NO: 294160 - DNA, 20 bp, synthetic construct
  source 1..20: mol_type = other DNA
gaagcatactttctcatgct

SEQ ID NO: 294161 - DNA, 20 bp, synthetic construct
  source 1..20: mol_type = other DNA
agaagcatactttctcatgc

SEQ ID NO: 294162 - DNA, 20 bp, synthetic construct
  source 1..20: mol_type = other DNA
gagaagcatactttctcatg

SEQ ID NO: 294163 - DNA, 20 bp, synthetic construct
  source 1..20: mol_type = other DNA
tgagaagcatactttctcat

SEQ ID NO: 294164 - DNA, 20 bp, synthetic construct
  source 1..20: mol_type = other DNA
atgagaagcatactttctca

SEQ ID NO: 294165 - DNA, 20 bp, synthetic construct
  source 1..20: mol_type = other DNA
catgagaagcatactttctc

SEQ ID NO: 294166 - DNA, 20 bp, synthetic construct
  source 1..20: mol_type = other DNA
ccatgagaagcatactttct

SEQ ID NO: 294167 - DNA, 20 bp, synthetic construct
  source 1..20: mol_type = other DNA
accatgagaagcatactttc

SEQ ID NO: 294168 - DNA, 20 bp, synthetic construct
  source 1..20: mol_type = other DNA
caccatgagaagcatacttt

SEQ ID NO: 294169 - DNA, 20 bp, synthetic construct
  source 1..20: mol_type = other DNA
ccaccatgagaagcatactt

SEQ ID NO: 294170 - DNA, 20 bp, synthetic construct
  source 1..20: mol_type = other DNA
gccaccatgagaagcatact

SEQ ID NO: 294171 - DNA, 20 bp, synthetic construct
  source 1..20: mol_type = other DNA
ggccaccatgagaagcatac

SEQ ID NO: 294172 - DNA, 20 bp, synthetic construct
  source 1..20: mol_type = other DNA
gggccaccatgagaagcata

SEQ ID NO: 294173 - DNA, 20 bp, synthetic construct
  source 1..20: mol_type = other DNA
tgggccaccatgagaagcat

SEQ ID NO: 294174 - DNA, 20 bp, synthetic construct
  source 1..20: mol_type = other DNA
ctgggccaccatgagaagca

SEQ ID NO: 294175 - DNA, 20 bp, synthetic construct
  source 1..20: mol_type = other DNA
actgggccaccatgagaagc

SEQ ID NO: 294176 - DNA, 20 bp, synthetic construct
  source 1..20: mol_type = other DNA
aactgggccaccatgagaag

SEQ ID NO: 294177 - DNA, 20 bp, synthetic construct
  source 1..20: mol_type = other DNA
caactgggccaccatgagaa

SEQ ID NO: 294178 - DNA, 20 bp, synthetic construct
  source 1..20: mol_type = other DNA
ccaactgggccaccatgaga

SEQ ID NO: 294179 - DNA, 20 bp, synthetic construct
  source 1..20: mol_type = other DNA
cccaactgggccaccatgag

SEQ ID NO: 294180 - DNA, 20 bp, synthetic construct
  source 1..20: mol_type = other DNA
acccaactgggccaccatga

SEQ ID NO: 294181 - DNA, 20 bp, synthetic construct
  source 1..20: mol_type = other DNA
cacccaactgggccaccatg

SEQ ID NO: 294182 - DNA, 20 bp, synthetic construct
  source 1..20: mol_type = other DNA
ccacccaactgggccaccat

SEQ ID NO: 294183 - DNA, 20 bp, synthetic construct
  source 1..20: mol_type = other DNA
tccacccaactgggccacca

SEQ ID NO: 294184 - DNA, 20 bp, synthetic construct
  source 1..20: mol_type = other DNA
ttccacccaactgggccacc

SEQ ID NO: 294185 - DNA, 20 bp, synthetic construct
  source 1..20: mol_type = other DNA
cttccacccaactgggccac

SEQ ID NO: 294186 - DNA, 20 bp, synthetic construct
  source 1..20: mol_type = other DNA
acttccacccaactgggcca

SEQ ID NO: 294187 - DNA, 20 bp, synthetic construct
  source 1..20: mol_type = other DNA
cacttccacccaactgggcc

SEQ ID NO: 294188 - DNA, 20 bp, synthetic construct
  source 1..20: mol_type = other DNA
ccacttccacccaactgggc

SEQ ID NO: 294189 - DNA, 20 bp, synthetic construct
  source 1..20: mol_type = other DNA
gccacttccacccaactggg

SEQ ID NO: 294190 - DNA, 20 bp, synthetic construct
  source 1..20: mol_type = other DNA
tgccacttccacccaactgg

SEQ ID NO: 294191 - DNA, 20 bp, synthetic construct
  source 1..20: mol_type = other DNA
ctgccacttccacccaactg

SEQ ID NO: 294192 - DNA, 20 bp, synthetic construct
  source 1..20: mol_type = other DNA
gctgccacttccacccaact

SEQ ID NO: 294193 - DNA, 20 bp, synthetic construct
  source 1..20: mol_type = other DNA
ggctgccacttccacccaac

SEQ ID NO: 294194 - DNA, 20 bp, synthetic construct
  source 1..20: mol_type = other DNA
cggctgccacttccacccaa

SEQ ID NO: 294195 - DNA, 20 bp, synthetic construct
  source 1..20: mol_type = other DNA
ccggctgccacttccaccca

SEQ ID NO: 294196 - DNA, 20 bp, synthetic construct
  source 1..20: mol_type = other DNA
cccggctgccacttccaccc

SEQ ID NO: 294197 - DNA, 20 bp, synthetic construct
  source 1..20: mol_type = other DNA
gcccggctgccacttccacc

SEQ ID NO: 294198 - DNA, 20 bp, synthetic construct
  source 1..20: mol_type = other DNA
ggcccggctgccacttccac

SEQ ID NO: 294199 - DNA, 20 bp, synthetic construct
  source 1..20: mol_type = other DNA
cggcccggctgccacttcca

SEQ ID NO: 294200 - DNA, 20 bp, synthetic construct
  source 1..20: mol_type = other DNA
acggcccggctgccacttcc

SEQ ID NO: 294201 - DNA, 20 bp, synthetic construct
  source 1..20: mol_type = other DNA
gacggcccggctgccacttc

SEQ ID NO: 294202 - DNA, 20 bp, synthetic construct
  source 1..20: mol_type = other DNA
agacggcccggctgccactt

SEQ ID NO: 294203 - DNA, 20 bp, synthetic construct
  source 1..20: mol_type = other DNA
aagacggcccggctgccact

SEQ ID NO: 294204 - DNA, 20 bp, synthetic construct
  source 1..20: mol_type = other DNA
aaagacggcccggctgccac

SEQ ID NO: 294205 - DNA, 20 bp, synthetic construct
  source 1..20: mol_type = other DNA
gaaagacggcccggctgcca

SEQ ID NO: 294206 - DNA, 20 bp, synthetic construct
  source 1..20: mol_type = other DNA
ggaaagacggcccggctgcc

SEQ ID NO: 294207 - DNA, 20 bp, synthetic construct
  source 1..20: mol_type = other DNA
tggaaagacggcccggctgc

SEQ ID NO: 294208 - DNA, 20 bp, synthetic construct
  source 1..20: mol_type = other DNA
gtggaaagacggcccggctg

SEQ ID NO: 294209 - DNA, 20 bp, synthetic construct
  source 1..20: mol_type = other DNA
ggtggaaagacggcccggct

SEQ ID NO: 294210 - DNA, 20 bp, synthetic construct
  source 1..20: mol_type = other DNA
tggtggaaagacggcccggc

SEQ ID NO: 294211 - DNA, 20 bp, synthetic construct
  source 1..20: mol_type = other DNA
ctggtggaaagacggcccgg

SEQ ID NO: 294212 - DNA, 20 bp, synthetic construct
  source 1..20: mol_type = other DNA
cctggtggaaagacggcccg

SEQ ID NO: 294213 - DNA, 20 bp, synthetic construct
  source 1..20: mol_type = other DNA
gcctggtggaaagacggccc

SEQ ID NO: 294214 - DNA, 20 bp, synthetic construct
  source 1..20: mol_type = other DNA
ggcctggtggaaagacggcc

SEQ ID NO: 294215 - DNA, 20 bp, synthetic construct
  source 1..20: mol_type = other DNA
tggcctggtggaaagacggc

SEQ ID NO: 294216 - DNA, 20 bp, synthetic construct
  source 1..20: mol_type = other DNA
gtggcctggtggaaagacgg

SEQ ID NO: 294217 - DNA, 20 bp, synthetic construct
  source 1..20: mol_type = other DNA
agtggcctggtggaaagacg

SEQ ID NO: 294218 - DNA, 20 bp, synthetic construct
  source 1..20: mol_type = other DNA
gagtggcctggtggaaagac

SEQ ID NO: 294219 - DNA, 20 bp, synthetic construct
  source 1..20: mol_type = other DNA
tgagtggcctggtggaaaga

SEQ ID NO: 294220 - DNA, 20 bp, synthetic construct
  source 1..20: mol_type = other DNA
ttgagtggcctggtggaaag

SEQ ID NO: 294221 - DNA, 20 bp, synthetic construct
  source 1..20: mol_type = other DNA
cttgagtggcctggtggaaa

SEQ ID NO: 294222 - DNA, 20 bp, synthetic construct
  source 1..20: mol_type = other DNA
acttgagtggcctggtggaa

SEQ ID NO: 294223 - DNA, 20 bp, synthetic construct
  source 1..20: mol_type = other DNA
tacttgagtggcctggtgga

SEQ ID NO: 294224 - DNA, 20 bp, synthetic construct
  source 1..20: mol_type = other DNA
ctacttgagtggcctggtgg

SEQ ID NO: 294225 - DNA, 20 bp, synthetic construct
  source 1..20: mol_type = other DNA
gctacttgagtggcctggtg

SEQ ID NO: 294226 - DNA, 20 bp, synthetic construct
  source 1..20: mol_type = other DNA
tgctacttgagtggcctggt

SEQ ID NO: 294227 - DNA, 20 bp, synthetic construct
  source 1..20: mol_type = other DNA
ctgctacttgagtggcctgg

SEQ ID NO: 294228 - DNA, 20 bp, synthetic construct
  source 1..20: mol_type = other DNA
gctgctacttgagtggcctg

SEQ ID NO: 294229 - DNA, 20 bp, synthetic construct
  source 1..20: mol_type = other DNA
agctgctacttgagtggcct

SEQ ID NO: 294230 - DNA, 20 bp, synthetic construct
  source 1..20: mol_type = other DNA
cagctgctacttgagtggcc

SEQ ID NO: 294231 - DNA, 20 bp, synthetic construct
  source 1..20: mol_type = other DNA
tcagctgctacttgagtggc

SEQ ID NO: 294232 - DNA, 20 bp, synthetic construct
  source 1..20: mol_type = other DNA
ctcagctgctacttgagtgg

SEQ ID NO: 294233 - DNA, 20 bp, synthetic construct
  source 1..20: mol_type = other DNA
tctcagctgctacttgagtg

SEQ ID NO: 294234 - DNA, 20 bp, synthetic construct
  source 1..20: mol_type = other DNA
ctctcagctgctacttgagt

SEQ ID NO: 294235 - DNA, 20 bp, synthetic construct
  source 1..20: mol_type = other DNA
tctctcagctgctacttgag

SEQ ID NO: 294236 - DNA, 20 bp, synthetic construct
  source 1..20: mol_type = other DNA
gtctctcagctgctacttga

SEQ ID NO: 294237 - DNA, 20 bp, synthetic construct
  source 1..20: mol_type = other DNA
ggtctctcagctgctacttg

SEQ ID NO: 294238 - DNA, 20 bp, synthetic construct
  source 1..20: mol_type = other DNA
gggtctctcagctgctactt

SEQ ID NO: 294239 - DNA, 20 bp, synthetic construct
  source 1..20: mol_type = other DNA
ggggtctctcagctgctact

SEQ ID NO: 294240 - DNA, 20 bp, synthetic construct
  source 1..20: mol_type = other DNA
aggggtctctcagctgctac

SEQ ID NO: 294241 - DNA, 20 bp, synthetic construct
  source 1..20: mol_type = other DNA
caggggtctctcagctgcta

SEQ ID NO: 294242 - DNA, 20 bp, synthetic construct
  source 1..20: mol_type = other DNA
gcaggggtctctcagctgct

SEQ ID NO: 294243 - DNA, 20 bp, synthetic construct
  source 1..20: mol_type = other DNA
ggcaggggtctctcagctgc

SEQ ID NO: 294244 - DNA, 20 bp, synthetic construct
  source 1..20: mol_type = other DNA
gggcaggggtctctcagctg

SEQ ID NO: 294245 - DNA, 20 bp, synthetic construct
  source 1..20: mol_type = other DNA
agggcaggggtctctcagct

SEQ ID NO: 294246 - DNA, 20 bp, synthetic construct
  source 1..20: mol_type = other DNA
cagggcaggggtctctcagc

SEQ ID NO: 294247 - DNA, 20 bp, synthetic construct
  source 1..20: mol_type = other DNA
ccagggcaggggtctctcag

SEQ ID NO: 294248 - DNA, 20 bp, synthetic construct
  source 1..20: mol_type = other DNA
gccagggcaggggtctctca

SEQ ID NO: 294249 - DNA, 20 bp, synthetic construct
  source 1..20: mol_type = other DNA
ggccagggcaggggtctctc

SEQ ID NO: 294250 - DNA, 20 bp, synthetic construct
  source 1..20: mol_type = other DNA
tggccagggcaggggtctct

SEQ ID NO: 294251 - DNA, 20 bp, synthetic construct
  source 1..20: mol_type = other DNA
ctggccagggcaggggtctc

SEQ ID NO: 294252 - DNA, 20 bp, synthetic construct
  source 1..20: mol_type = other DNA
actggccagggcaggggtct

SEQ ID NO: 294253 - DNA, 20 bp, synthetic construct
  source 1..20: mol_type = other DNA
gactggccagggcaggggtc

SEQ ID NO: 294254 - DNA, 20 bp, synthetic construct
  source 1..20: mol_type = other DNA
ggactggccagggcaggggt

SEQ ID NO: 294255 - DNA, 20 bp, synthetic construct
  source 1..20: mol_type = other DNA
gggactggccagggcagggg

SEQ ID NO: 294256 - DNA, 20 bp, synthetic construct
  source 1..20: mol_type = other DNA
ggggactggccagggcaggg

SEQ ID NO: 294257 - DNA, 20 bp, synthetic construct
  source 1..20: mol_type = other DNA
cggggactggccagggcagg

SEQ ID NO: 294258 - DNA, 20 bp, synthetic construct
  source 1..20: mol_type = other DNA
gcggggactggccagggcag

SEQ ID NO: 294259 - DNA, 20 bp, synthetic construct
  source 1..20: mol_type = other DNA
ggcggggactggccagggca

SEQ ID NO: 294260 - DNA, 20 bp, synthetic construct
  source 1..20: mol_type = other DNA
gggcggggactggccagggc

SEQ ID NO: 294261 - DNA, 20 bp, synthetic construct
  source 1..20: mol_type = other DNA
agggcggggactggccaggg

SEQ ID NO: 294262 - DNA, 20 bp, synthetic construct
  source 1..20: mol_type = other DNA
gagggcggggactggccagg

SEQ ID NO: 294263 - DNA, 20 bp, synthetic construct
  source 1..20: mol_type = other DNA
ggagggcggggactggccag

SEQ ID NO: 294264 - DNA, 20 bp, synthetic construct
  source 1..20: mol_type = other DNA
gggagggcggggactggcca

SEQ ID NO: 294265 - DNA, 20 bp, synthetic construct
  source 1..20: mol_type = other DNA
ggggagggcggggactggcc

SEQ ID NO: 294266 - DNA, 20 bp, synthetic construct
  source 1..20: mol_type = other DNA
aggggagggcggggactggc

SEQ ID NO: 294267 - DNA, 20 bp, synthetic construct
  source 1..20: mol_type = other DNA
gaggggagggcggggactgg

SEQ ID NO: 294268 - DNA, 20 bp, synthetic construct
  source 1..20: mol_type = other DNA
agaggggagggcggggactg

SEQ ID NO: 294269 - DNA, 20 bp, synthetic construct
  source 1..20: mol_type = other DNA
aagaggggagggcggggact

SEQ ID NO: 294270 - DNA, 20 bp, synthetic construct
  source 1..20: mol_type = other DNA
caagaggggagggcggggac

SEQ ID NO: 294271 - DNA, 20 bp, synthetic construct
  source 1..20: mol_type = other DNA
gcaagaggggagggcgggga

SEQ ID NO: 294272 - DNA, 20 bp, synthetic construct
  source 1..20: mol_type = other DNA
ggcaagaggggagggcgggg

SEQ ID NO: 294273 - DNA, 20 bp, synthetic construct
  source 1..20: mol_type = other DNA
tggcaagaggggagggcggg

SEQ ID NO: 294274 - DNA, 20 bp, synthetic construct
  source 1..20: mol_type = other DNA
gtggcaagaggggagggcgg

SEQ ID NO: 294275 - DNA, 20 bp, synthetic construct
  source 1..20: mol_type = other DNA
agtggcaagaggggagggcg

SEQ ID NO: 294276 - DNA, 20 bp, synthetic construct
  source 1..20: mol_type = other DNA
cagtggcaagaggggagggc

SEQ ID NO: 294277 - DNA, 20 bp, synthetic construct
  source 1..20: mol_type = other DNA
gcagtggcaagaggggaggg

SEQ ID NO: 294278 - DNA, 20 bp, synthetic construct
  source 1..20: mol_type = other DNA
ggcagtggcaagaggggagg

SEQ ID NO: 294279 - DNA, 20 bp, synthetic construct
  source 1..20: mol_type = other DNA
aggcagtggcaagaggggag

SEQ ID NO: 294280 - DNA, 20 bp, synthetic construct
  source 1..20: mol_type = other DNA
gaggcagtggcaagagggga

SEQ ID NO: 294281 - DNA, 20 bp, synthetic construct
  source 1..20: mol_type = other DNA
agaggcagtggcaagagggg

SEQ ID NO: 294282 - DNA, 20 bp, synthetic construct
  source 1..20: mol_type = other DNA
cagaggcagtggcaagaggg

SEQ ID NO: 294283 - DNA, 20 bp, synthetic construct
  source 1..20: mol_type = other DNA
ccagaggcagtggcaagagg

SEQ ID NO: 294284 - DNA, 20 bp, synthetic construct
  source 1..20: mol_type = other DNA
accagaggcagtggcaagag

SEQ ID NO: 294285 - DNA, 20 bp, synthetic construct
  source 1..20: mol_type = other DNA
aaccagaggcagtggcaaga

SEQ ID NO: 294286 - DNA, 20 bp, synthetic construct
  source 1..20: mol_type = other DNA
gaaccagaggcagtggcaag

SEQ ID NO: 294287 - DNA, 20 bp, synthetic construct
  source 1..20: mol_type = other DNA
agaaccagaggcagtggcaa

SEQ ID NO: 294288 - DNA, 20 bp, synthetic construct
  source 1..20: mol_type = other DNA
cagaaccagaggcagtggca

SEQ ID NO: 294289 - DNA, 20 bp, synthetic construct
  source 1..20: mol_type = other DNA
tcagaaccagaggcagtggc

SEQ ID NO: 294290 - DNA, 20 bp, synthetic construct
  source 1..20: mol_type = other DNA
ttcagaaccagaggcagtgg

SEQ ID NO: 294291 - DNA, 20 bp, synthetic construct
  source 1..20: mol_type = other DNA
gttcagaaccagaggcagtg

SEQ ID NO: 294292 - DNA, 20 bp, synthetic construct
  source 1..20: mol_type = other DNA
tgttcagaaccagaggcagt

SEQ ID NO: 294293 - DNA, 20 bp, synthetic construct
  source 1..20: mol_type = other DNA
ctgttcagaaccagaggcag

SEQ ID NO: 294294 - DNA, 20 bp, synthetic construct
  source 1..20: mol_type = other DNA
tctgttcagaaccagaggca

SEQ ID NO: 294295 - DNA, 20 bp, synthetic construct
  source 1..20: mol_type = other DNA
atctgttcagaaccagaggc

SEQ ID NO: 294296 - DNA, 20 bp, synthetic construct
  source 1..20: mol_type = other DNA
catctgttcagaaccagagg

SEQ ID NO: 294297 - DNA, 20 bp, synthetic construct
  source 1..20: mol_type = other DNA
ccatctgttcagaaccagag

SEQ ID NO: 294298 - DNA, 20 bp, synthetic construct
  source 1..20: mol_type = other DNA
cccatctgttcagaaccaga

SEQ ID NO: 294299 - DNA, 20 bp, synthetic construct
  source 1..20: mol_type = other DNA
gcccatctgttcagaaccag

SEQ ID NO: 294300 - DNA, 20 bp, synthetic construct
  source 1..20: mol_type = other DNA
tgcccatctgttcagaacca

SEQ ID NO: 294301 - DNA, 20 bp, synthetic construct
  source 1..20: mol_type = other DNA
gtgcccatctgttcagaacc

SEQ ID NO: 294302 - DNA, 20 bp, synthetic construct
  source 1..20: mol_type = other DNA
ggtgcccatctgttcagaac

SEQ ID NO: 294303 - DNA, 20 bp, synthetic construct
  source 1..20: mol_type = other DNA
gggtgcccatctgttcagaa

SEQ ID NO: 294304 - DNA, 20 bp, synthetic construct
  source 1..20: mol_type = other DNA
agggtgcccatctgttcaga

SEQ ID NO: 294305 - DNA, 20 bp, synthetic construct
  source 1..20: mol_type = other DNA
gagggtgcccatctgttcag

SEQ ID NO: 294306 - DNA, 20 bp, synthetic construct
  source 1..20: mol_type = other DNA
tgagggtgcccatctgttca

SEQ ID NO: 294307 - DNA, 20 bp, synthetic construct
  source 1..20: mol_type = other DNA
atgagggtgcccatctgttc

SEQ ID NO: 294308 - DNA, 20 bp, synthetic construct
  source 1..20: mol_type = other DNA
gatgagggtgcccatctgtt

SEQ ID NO: 294309 - DNA, 20 bp, synthetic construct
  source 1..20: mol_type = other DNA
agatgagggtgcccatctgt

SEQ ID NO: 294310 - DNA, 20 bp, synthetic construct
  source 1..20: mol_type = other DNA
aagatgagggtgcccatctg

SEQ ID NO: 294311 - DNA, 20 bp, synthetic construct
  source 1..20: mol_type = other DNA
caagatgagggtgcccatct

SEQ ID NO: 294312 - DNA, 20 bp, synthetic construct
  source 1..20: mol_type = other DNA
acaagatgagggtgcccatc

SEQ ID NO: 294313 - DNA, 20 bp, synthetic construct
  source 1..20: mol_type = other DNA
tacaagatgagggtgcccat

SEQ ID NO: 294314 - DNA, 20 bp, synthetic construct
  source 1..20: mol_type = other DNA
atacaagatgagggtgccca

SEQ ID NO: 294315 - DNA, 20 bp, synthetic construct
  source 1..20: mol_type = other DNA
aatacaagatgagggtgccc

SEQ ID NO: 294316 - DNA, 20 bp, synthetic construct
  source 1..20: mol_type = other DNA
aaatacaagatgagggtgcc

SEQ ID NO: 294317 - DNA, 20 bp, synthetic construct
  source 1..20: mol_type = other DNA
caaatacaagatgagggtgc

SEQ ID NO: 294318 - DNA, 20 bp, synthetic construct
  source 1..20: mol_type = other DNA
acaaatacaagatgagggtg

SEQ ID NO: 294319 - DNA, 20 bp, synthetic construct
  source 1..20: mol_type = other DNA
cacaaatacaagatgagggt

SEQ ID NO: 294320 - DNA, 20 bp, synthetic construct
  source 1..20: mol_type = other DNA
tcacaaatacaagatgaggg

SEQ ID NO: 294321 - DNA, 20 bp, synthetic construct
  source 1..20: mol_type = other DNA
atcacaaatacaagatgagg

SEQ ID NO: 294322 - DNA, 20 bp, synthetic construct
  source 1..20: mol_type = other DNA
aatcacaaatacaagatgag

SEQ ID NO: 294323 - DNA, 20 bp, synthetic construct
  source 1..20: mol_type = other DNA
taatcacaaatacaagatga

SEQ ID NO: 294324 - DNA, 20 bp, synthetic construct
  source 1..20: mol_type = other DNA
ttaatcacaaatacaagatg

SEQ ID NO: 294325 - DNA, 20 bp, synthetic construct
  source 1..20: mol_type = other DNA
attaatcacaaatacaagat

SEQ ID NO: 294326 - DNA, 20 bp, synthetic construct
  source 1..20: mol_type = other DNA
cattaatcacaaatacaaga

SEQ ID NO: 294327 - DNA, 20 bp, synthetic construct
  source 1..20: mol_type = other DNA
acattaatcacaaatacaag

SEQ ID NO: 294328 - DNA, 20 bp, synthetic construct
  source 1..20: mol_type = other DNA
gacattaatcacaaatacaa

SEQ ID NO: 294329 - DNA, 20 bp, synthetic construct
  source 1..20: mol_type = other DNA
agacattaatcacaaataca

SEQ ID NO: 294330 - DNA, 20 bp, synthetic construct
  source 1..20: mol_type = other DNA
tagacattaatcacaaatac

SEQ ID NO: 294331 - DNA, 20 bp, synthetic construct
  source 1..20: mol_type = other DNA
ttagacattaatcacaaata

SEQ ID NO: 294332 - DNA, 20 bp, synthetic construct
  source 1..20: mol_type = other DNA
gttagacattaatcacaaat

SEQ ID NO: 294333 - DNA, 20 bp, synthetic construct
  source 1..20: mol_type = other DNA
tgttagacattaatcacaaa

SEQ ID NO: 294334 - DNA, 20 bp, synthetic construct
  source 1..20: mol_type = other DNA
ttgttagacattaatcacaa

SEQ ID NO: 294335 - DNA, 20 bp, synthetic construct
  source 1..20: mol_type = other DNA
attgttagacattaatcaca

SEQ ID NO: 294336 - DNA, 20 bp, synthetic construct
  source 1..20: mol_type = other DNA
cattgttagacattaatcac

SEQ ID NO: 294337 - DNA, 20 bp, synthetic construct
  source 1..20: mol_type = other DNA
acattgttagacattaatca

SEQ ID NO: 294338 - DNA, 20 bp, synthetic construct
  source 1..20: mol_type = other DNA
tacattgttagacattaatc

SEQ ID NO: 294339 - DNA, 20 bp, synthetic construct
  source 1..20: mol_type = other DNA
ctacattgttagacattaat

SEQ ID NO: 294340 - DNA, 20 bp, synthetic construct
  source 1..20: mol_type = other DNA
actacattgttagacattaa

SEQ ID NO: 294341 - DNA, 20 bp, synthetic construct
  source 1..20: mol_type = other DNA
aactacattgttagacatta

SEQ ID NO: 294342 - DNA, 20 bp, synthetic construct
  source 1..20: mol_type = other DNA
aaactacattgttagacatt

SEQ ID NO: 294343 - DNA, 20 bp, synthetic construct
  source 1..20: mol_type = other DNA
aaaactacattgttagacat

SEQ ID NO: 294344 - DNA, 20 bp, synthetic construct
  source 1..20: mol_type = other DNA
caaaactacattgttagaca

SEQ ID NO: 294345 - DNA, 20 bp, synthetic construct
  source 1..20: mol_type = other DNA
acaaaactacattgttagac

SEQ ID NO: 294346 - DNA, 20 bp, synthetic construct
  source 1..20: mol_type = other DNA
cacaaaactacattgttaga

SEQ ID NO: 294347 - DNA, 20 bp, synthetic construct
  source 1..20: mol_type = other DNA
tcacaaaactacattgttag

SEQ ID NO: 294348 - DNA, 20 bp, synthetic construct
  source 1..20: mol_type = other DNA
ctcacaaaactacattgtta

SEQ ID NO: 294349 - DNA, 20 bp, synthetic construct
  source 1..20: mol_type = other DNA
tctcacaaaactacattgtt

SEQ ID NO: 294350 - DNA, 20 bp, synthetic construct
  source 1..20: mol_type = other DNA
ttctcacaaaactacattgt

SEQ ID NO: 294351 - DNA, 20 bp, synthetic construct
  source 1..20: mol_type = other DNA
cttctcacaaaactacattg

SEQ ID NO: 294352 - DNA, 20 bp, synthetic construct
  source 1..20: mol_type = other DNA
ccttctcacaaaactacatt

SEQ ID NO: 294353 - DNA, 20 bp, synthetic construct
  source 1..20: mol_type = other DNA
cccttctcacaaaactacat

SEQ ID NO: 294354 - DNA, 20 bp, synthetic construct
  source 1..20: mol_type = other DNA
acccttctcacaaaactaca

SEQ ID NO: 294355 - DNA, 20 bp, synthetic construct
  source 1..20: mol_type = other DNA
aacccttctcacaaaactac

SEQ ID NO: 294356 - DNA, 20 bp, synthetic construct
  source 1..20: mol_type = other DNA
aaacccttctcacaaaacta

SEQ ID NO: 294357 - DNA, 20 bp, synthetic construct
  source 1..20: mol_type = other DNA
caaacccttctcacaaaact

SEQ ID NO: 294358 - DNA, 20 bp, synthetic construct
  source 1..20: mol_type = other DNA
gcaaacccttctcacaaaac

SEQ ID NO: 294359 - DNA, 20 bp, synthetic construct
  source 1..20: mol_type = other DNA
agcaaacccttctcacaaaa

SEQ ID NO: 294360 - DNA, 20 bp, synthetic construct
  source 1..20: mol_type = other DNA
cagcaaacccttctcacaaa

SEQ ID NO: 294361 - DNA, 20 bp, synthetic construct
  source 1..20: mol_type = other DNA
tcagcaaacccttctcacaa

SEQ ID NO: 294362 - DNA, 20 bp, synthetic construct
  source 1..20: mol_type = other DNA
atcagcaaacccttctcaca

SEQ ID NO: 294363 - DNA, 20 bp, synthetic construct
  source 1..20: mol_type = other DNA
tatcagcaaacccttctcac

SEQ ID NO: 294364 - DNA, 20 bp, synthetic construct
  source 1..20: mol_type = other DNA
gtatcagcaaacccttctca

SEQ ID NO: 294365 - DNA, 20 bp, synthetic construct
  source 1..20: mol_type = other DNA
tgtatcagcaaacccttctc

SEQ ID NO: 294366 - DNA, 20 bp, synthetic construct
  source 1..20: mol_type = other DNA
ctgtatcagcaaacccttct

SEQ ID NO: 294367 - DNA, 20 bp, synthetic construct
  source 1..20: mol_type = other DNA
gctgtatcagcaaacccttc

SEQ ID NO: 294368 - DNA, 20 bp, synthetic construct
  source 1..20: mol_type = other DNA
ggctgtatcagcaaaccctt

SEQ ID NO: 294369 - DNA, 20 bp, synthetic construct
  source 1..20: mol_type = other DNA
aggctgtatcagcaaaccct

SEQ ID NO: 294370 - DNA, 20 bp, synthetic construct
  source 1..20: mol_type = other DNA
aaggctgtatcagcaaaccc

SEQ ID NO: 294371 - DNA, 20 bp, synthetic construct
  source 1..20: mol_type = other DNA
caaggctgtatcagcaaacc

SEQ ID NO: 294372 - DNA, 20 bp, synthetic construct
  source 1..20: mol_type = other DNA
gcaaggctgtatcagcaaac

SEQ ID NO: 294373 - DNA, 20 bp, synthetic construct
  source 1..20: mol_type = other DNA
agcaaggctgtatcagcaaa

SEQ ID NO: 294374 - DNA, 20 bp, synthetic construct
  source 1..20: mol_type = other DNA
cagcaaggctgtatcagcaa

SEQ ID NO: 294375 - DNA, 20 bp, synthetic construct
  source 1..20: mol_type = other DNA
gcagcaaggctgtatcagca

SEQ ID NO: 294376 - DNA, 20 bp, synthetic construct
  source 1..20: mol_type = other DNA
tgcagcaaggctgtatcagc

SEQ ID NO: 294377 - DNA, 20 bp, synthetic construct
  source 1..20: mol_type = other DNA
ctgcagcaaggctgtatcag

SEQ ID NO: 294378 - DNA, 20 bp, synthetic construct
  source 1..20: mol_type = other DNA
tctgcagcaaggctgtatca

SEQ ID NO: 294379 - DNA, 20 bp, synthetic construct
  source 1..20: mol_type = other DNA
atctgcagcaaggctgtatc

SEQ ID NO: 294380 - DNA, 20 bp, synthetic construct
  source 1..20: mol_type = other DNA
catctgcagcaaggctgtat

SEQ ID NO: 294381 - DNA, 20 bp, synthetic construct
  source 1..20: mol_type = other DNA
gcatctgcagcaaggctgta

SEQ ID NO: 294382 - DNA, 20 bp, synthetic construct
  source 1..20: mol_type = other DNA
agcatctgcagcaaggctgt

SEQ ID NO: 294383 - DNA, 20 bp, synthetic construct
  source 1..20: mol_type = other DNA
cagcatctgcagcaaggctg

SEQ ID NO: 294384 - DNA, 20 bp, synthetic construct
  source 1..20: mol_type = other DNA
gcagcatctgcagcaaggct

SEQ ID NO: 294385 - DNA, 20 bp, synthetic construct
  source 1..20: mol_type = other DNA
cgcagcatctgcagcaaggc

SEQ ID NO: 294386 - DNA, 20 bp, synthetic construct
  source 1..20: mol_type = other DNA
tcgcagcatctgcagcaagg

SEQ ID NO: 294387 - DNA, 20 bp, synthetic construct
  source 1..20: mol_type = other DNA
ttcgcagcatctgcagcaag

SEQ ID NO: 294388 - DNA, 20 bp, synthetic construct
  source 1..20: mol_type = other DNA
gttcgcagcatctgcagcaa

SEQ ID NO: 294389 - DNA, 20 bp, synthetic construct
  source 1..20: mol_type = other DNA
agttcgcagcatctgcagca

SEQ ID NO: 294390 - DNA, 20 bp, synthetic construct
  source 1..20: mol_type = other DNA
cagttcgcagcatctgcagc

SEQ ID NO: 294391 - DNA, 20 bp, synthetic construct
  source 1..20: mol_type = other DNA
acagttcgcagcatctgcag

SEQ ID NO: 294392 - DNA, 20 bp, synthetic construct
  source 1..20: mol_type = other DNA
cacagttcgcagcatctgca

SEQ ID NO: 294393 - DNA, 20 bp, synthetic construct
  source 1..20: mol_type = other DNA
ccacagttcgcagcatctgc

SEQ ID NO: 294394 - DNA, 20 bp, synthetic construct
  source 1..20: mol_type = other DNA
gccacagttcgcagcatctg

SEQ ID NO: 294395 - DNA, 20 bp, synthetic construct
  source 1..20: mol_type = other DNA
ggccacagttcgcagcatct

SEQ ID NO: 294396 - DNA, 20 bp, synthetic construct
  source 1..20: mol_type = other DNA
aggccacagttcgcagcatc

SEQ ID NO: 294397 - DNA, 20 bp, synthetic construct
  source 1..20: mol_type = other DNA
caggccacagttcgcagcat

SEQ ID NO: 294398 - DNA, 20 bp, synthetic construct
  source 1..20: mol_type = other DNA
ccaggccacagttcgcagca

SEQ ID NO: 294399 - DNA, 20 bp, synthetic construct
  source 1..20: mol_type = other DNA
cccaggccacagttcgcagc

SEQ ID NO: 294400 - DNA, 20 bp, synthetic construct
  source 1..20: mol_type = other DNA
ccccaggccacagttcgcag

SEQ ID NO: 294401 - DNA, 20 bp, synthetic construct
  source 1..20: mol_type = other DNA
gccccaggccacagttcgca

SEQ ID NO: 294402 - DNA, 20 bp, synthetic construct
  source 1..20: mol_type = other DNA
tgccccaggccacagttcgc

SEQ ID NO: 294403 - DNA, 20 bp, synthetic construct
  source 1..20: mol_type = other DNA
ctgccccaggccacagttcg

SEQ ID NO: 294404 - DNA, 20 bp, synthetic construct
  source 1..20: mol_type = other DNA
tctgccccaggccacagttc

SEQ ID NO: 294405 - DNA, 20 bp, synthetic construct
  source 1..20: mol_type = other DNA
gtctgccccaggccacagtt

SEQ ID NO: 294406 - DNA, 20 bp, synthetic construct
  source 1..20: mol_type = other DNA
ggtctgccccaggccacagt

SEQ ID NO: 294407 - DNA, 20 bp, synthetic construct
  source 1..20: mol_type = other DNA
aggtctgccccaggccacag

SEQ ID NO: 294408 - DNA, 20 bp, synthetic construct
  source 1..20: mol_type = other DNA
aaggtctgccccaggccaca

SEQ ID NO: 294409 - DNA, 20 bp, synthetic construct
  source 1..20: mol_type = other DNA
taaggtctgccccaggccac

SEQ ID NO: 294410 - DNA, 20 bp, synthetic construct
  source 1..20: mol_type = other DNA
gtaaggtctgccccaggcca

SEQ ID NO: 294411 - DNA, 20 bp, synthetic construct
  source 1..20: mol_type = other DNA
ggtaaggtctgccccaggcc

SEQ ID NO: 294412 - DNA, 20 bp, synthetic construct
  source 1..20: mol_type = other DNA
aggtaaggtctgccccaggc

SEQ ID NO: 294413 - DNA, 20 bp, synthetic construct
  source 1..20: mol_type = other DNA
gaggtaaggtctgccccagg

SEQ ID NO: 294414 - DNA, 20 bp, synthetic construct
  source 1..20: mol_type = other DNA
ggaggtaaggtctgccccag

SEQ ID NO: 294415 - DNA, 20 bp, synthetic construct
  source 1..20: mol_type = other DNA
tggaggtaaggtctgcccca

SEQ ID NO: 294416 - DNA, 20 bp, synthetic construct
  source 1..20: mol_type = other DNA
ctggaggtaaggtctgcccc

SEQ ID NO: 294417 - DNA, 20 bp, synthetic construct
  source 1..20: mol_type = other DNA
tctggaggtaaggtctgccc

SEQ ID NO: 294418 - DNA, 20 bp, synthetic construct
  source 1..20: mol_type = other DNA
gtctggaggtaaggtctgcc

SEQ ID NO: 294419 - DNA, 20 bp, synthetic construct
  source 1..20: mol_type = other DNA
tgtctggaggtaaggtctgc

SEQ ID NO: 294420 - DNA, 20 bp, synthetic construct
  source 1..20: mol_type = other DNA
gtgtctggaggtaaggtctg

SEQ ID NO: 294421 - DNA, 20 bp, synthetic construct
  source 1..20: mol_type = other DNA
cgtgtctggaggtaaggtct

SEQ ID NO: 294422 - DNA, 20 bp, synthetic construct
  source 1..20: mol_type = other DNA
gcgtgtctggaggtaaggtc

SEQ ID NO: 294423 - DNA, 20 bp, synthetic construct
  source 1..20: mol_type = other DNA
ggcgtgtctggaggtaaggt

SEQ ID NO: 294424 - DNA, 20 bp, synthetic construct
  source 1..20: mol_type = other DNA
gggcgtgtctggaggtaagg

SEQ ID NO: 294425 - DNA, 20 bp, synthetic construct
  source 1..20: mol_type = other DNA
agggcgtgtctggaggtaag

SEQ ID NO: 294426 - DNA, 20 bp, synthetic construct
  source 1..20: mol_type = other DNA
cagggcgtgtctggaggtaa

SEQ ID NO: 294427 - DNA, 20 bp, synthetic construct
  source 1..20: mol_type = other DNA
tcagggcgtgtctggaggta

SEQ ID NO: 294428 - DNA, 20 bp, synthetic construct
  source 1..20: mol_type = other DNA
ctcagggcgtgtctggaggt

SEQ ID NO: 294429 - DNA, 20 bp, synthetic construct
  source 1..20: mol_type = other DNA
cctcagggcgtgtctggagg

SEQ ID NO: 294430 - DNA, 20 bp, synthetic construct
  source 1..20: mol_type = other DNA
gcctcagggcgtgtctggag

SEQ ID NO: 294431 - DNA, 20 bp, synthetic construct
  source 1..20: mol_type = other DNA
tgcctcagggcgtgtctgga

SEQ ID NO: 294432 - DNA, 20 bp, synthetic construct
  source 1..20: mol_type = other DNA
ctgcctcagggcgtgtctgg

SEQ ID NO: 294433 - DNA, 20 bp, synthetic construct
  source 1..20: mol_type = other DNA
cctgcctcagggcgtgtctg

SEQ ID NO: 294434 - DNA, 20 bp, synthetic construct
  source 1..20: mol_type = other DNA
ccctgcctcagggcgtgtct

SEQ ID NO: 294435 - DNA, 20 bp, synthetic construct
  source 1..20: mol_type = other DNA
cccctgcctcagggcgtgtc

SEQ ID NO: 294436 - DNA, 20 bp, synthetic construct
  source 1..20: mol_type = other DNA
tcccctgcctcagggcgtgt

SEQ ID NO: 294437 - DNA, 20 bp, synthetic construct
  source 1..20: mol_type = other DNA
ctcccctgcctcagggcgtg

SEQ ID NO: 294438 - DNA, 20 bp, synthetic construct
  source 1..20: mol_type = other DNA
cctcccctgcctcagggcgt

SEQ ID NO: 294439 - DNA, 20 bp, synthetic construct
  source 1..20: mol_type = other DNA
ccctcccctgcctcagggcg

SEQ ID NO: 294440 - DNA, 20 bp, synthetic construct
  source 1..20: mol_type = other DNA
gccctcccctgcctcagggc

SEQ ID NO: 294441 - DNA, 20 bp, synthetic construct
  source 1..20: mol_type = other DNA
tgccctcccctgcctcaggg

SEQ ID NO: 294442 - DNA, 20 bp, synthetic construct
  source 1..20: mol_type = other DNA
gtgccctcccctgcctcagg

SEQ ID NO: 294443 - DNA, 20 bp, synthetic construct
  source 1..20: mol_type = other DNA
agtgccctcccctgcctcag

SEQ ID NO: 294444 - DNA, 20 bp, synthetic construct
  source 1..20: mol_type = other DNA
cagtgccctcccctgcctca

SEQ ID NO: 294445 - DNA, 20 bp, synthetic construct
  source 1..20: mol_type = other DNA
ccagtgccctcccctgcctc

SEQ ID NO: 294446 - DNA, 20 bp, synthetic construct
  source 1..20: mol_type = other DNA
gccagtgccctcccctgcct

SEQ ID NO: 294447 - DNA, 20 bp, synthetic construct
  source 1..20: mol_type = other DNA
ggccagtgccctcccctgcc

SEQ ID NO: 294448 - DNA, 20 bp, synthetic construct
  source 1..20: mol_type = other DNA
gggccagtgccctcccctgc

SEQ ID NO: 294449 - DNA, 20 bp, synthetic construct
  source 1..20: mol_type = other DNA
cgggccagtgccctcccctg

SEQ ID NO: 294450 - DNA, 20 bp, synthetic construct
  source 1..20: mol_type = other DNA
acgggccagtgccctcccct

SEQ ID NO: 294451 - DNA, 20 bp, synthetic construct
  source 1..20: mol_type = other DNA
tacgggccagtgccctcccc

SEQ ID NO: 294452 - DNA, 20 bp, synthetic construct
  source 1..20: mol_type = other DNA
ctacgggccagtgccctccc

SEQ ID NO: 294453 - DNA, 20 bp, synthetic construct
  source 1..20: mol_type = other DNA
gctacgggccagtgccctcc

SEQ ID NO: 294454 - DNA, 20 bp, synthetic construct
  source 1..20: mol_type = other DNA
agctacgggccagtgccctc

SEQ ID NO: 294455 - DNA, 20 bp, synthetic construct
  source 1..20: mol_type = other DNA
cagctacgggccagtgccct

SEQ ID NO: 294456 - DNA, 20 bp, synthetic construct
  source 1..20: mol_type = other DNA
ccagctacgggccagtgccc

SEQ ID NO: 294457 - DNA, 20 bp, synthetic construct
  source 1..20: mol_type = other DNA
gccagctacgggccagtgcc

SEQ ID NO: 294458 - DNA, 20 bp, synthetic construct
  source 1..20: mol_type = other DNA
ggccagctacgggccagtgc

SEQ ID NO: 294459 - DNA, 20 bp, synthetic construct
  source 1..20: mol_type = other DNA
cggccagctacgggccagtg

SEQ ID NO: 294460 - DNA, 20 bp, synthetic construct
  source 1..20: mol_type = other DNA
tcggccagctacgggccagt

SEQ ID NO: 294461 - DNA, 20 bp, synthetic construct
  source 1..20: mol_type = other DNA
ctcggccagctacgggccag

SEQ ID NO: 294462 - DNA, 20 bp, synthetic construct
  source 1..20: mol_type = other DNA
tctcggccagctacgggcca

SEQ ID NO: 294463 - DNA, 20 bp, synthetic construct
  source 1..20: mol_type = other DNA
ctctcggccagctacgggcc

SEQ ID NO: 294464 - DNA, 20 bp, synthetic construct
  source 1..20: mol_type = other DNA
gctctcggccagctacgggc

SEQ ID NO: 294465 - DNA, 20 bp, synthetic construct
  source 1..20: mol_type = other DNA
agctctcggccagctacggg

SEQ ID NO: 294466 - DNA, 20 bp, synthetic construct
  source 1..20: mol_type = other DNA
gagctctcggccagctacgg

SEQ ID NO: 294467 - DNA, 20 bp, synthetic construct
  source 1..20: mol_type = other DNA
agagctctcggccagctacg

SEQ ID NO: 294468 - DNA, 20 bp, synthetic construct
  source 1..20: mol_type = other DNA
gagagctctcggccagctac

SEQ ID NO: 294469 - DNA, 20 bp, synthetic construct
  source 1..20: mol_type = other DNA
cgagagctctcggccagcta

SEQ ID NO: 294470 - DNA, 20 bp, synthetic construct
  source 1..20: mol_type = other DNA
ccgagagctctcggccagct

SEQ ID NO: 294471 - DNA, 20 bp, synthetic construct
  source 1..20: mol_type = other DNA
cccgagagctctcggccagc

SEQ ID NO: 294472 - DNA, 20 bp, synthetic construct
  source 1..20: mol_type = other DNA
acccgagagctctcggccag

SEQ ID NO: 294473 - DNA, 20 bp, synthetic construct
  source 1..20: mol_type = other DNA
aacccgagagctctcggcca

SEQ ID NO: 294474 - DNA, 20 bp, synthetic construct
  source 1..20: mol_type = other DNA
caacccgagagctctcggcc

SEQ ID NO: 294475 - DNA, 20 bp, synthetic construct
  source 1..20: mol_type = other DNA
gcaacccgagagctctcggc

SEQ ID NO: 294476 - DNA, 20 bp, synthetic construct
  source 1..20: mol_type = other DNA
cgcaacccgagagctctcgg

SEQ ID NO: 294477 - DNA, 20 bp, synthetic construct
  source 1..20: mol_type = other DNA
gcgcaacccgagagctctcg

SEQ ID NO: 294478 - DNA, 20 bp, synthetic construct
  source 1..20: mol_type = other DNA
cgcgcaacccgagagctctc

SEQ ID NO: 294479 - DNA, 20 bp, synthetic construct
  source 1..20: mol_type = other DNA
tcgcgcaacccgagagctct

SEQ ID NO: 294480 - DNA, 20 bp, synthetic construct
  source 1..20: mol_type = other DNA
gtcgcgcaacccgagagctc

SEQ ID NO: 294481 - DNA, 20 bp, synthetic construct
  source 1..20: mol_type = other DNA
tgtcgcgcaacccgagagct

SEQ ID NO: 294482 - DNA, 20 bp, synthetic construct
  source 1..20: mol_type = other DNA
ctgtcgcgcaacccgagagc

SEQ ID NO: 294483 - DNA, 20 bp, synthetic construct
  source 1..20: mol_type = other DNA
cctgtcgcgcaacccgagag

SEQ ID NO: 294484 - DNA, 20 bp, synthetic construct
  source 1..20: mol_type = other DNA
ccctgtcgcgcaacccgaga

SEQ ID NO: 294485 - DNA, 20 bp, synthetic construct
  source 1..20: mol_type = other DNA
tccctgtcgcgcaacccgag

SEQ ID NO: 294486 - DNA, 20 bp, synthetic construct
  source 1..20: mol_type = other DNA
atccctgtcgcgcaacccga

SEQ ID NO: 294487 - DNA, 20 bp, synthetic construct
  source 1..20: mol_type = other DNA
tatccctgtcgcgcaacccg

SEQ ID NO: 294488 - DNA, 20 bp, synthetic construct
  source 1..20: mol_type = other DNA
gtatccctgtcgcgcaaccc

SEQ ID NO: 294489 - DNA, 20 bp, synthetic construct
  source 1..20: mol_type = other DNA
agtatccctgtcgcgcaacc

SEQ ID NO: 294490 - DNA, 20 bp, synthetic construct
  source 1..20: mol_type = other DNA
aagtatccctgtcgcgcaac

SEQ ID NO: 294491 - DNA, 20 bp, synthetic construct
  source 1..20: mol_type = other DNA
aaagtatccctgtcgcgcaa

SEQ ID NO: 294492 - DNA, 20 bp, synthetic construct
  source 1..20: mol_type = other DNA
aaaagtatccctgtcgcgca

SEQ ID NO: 294493 - DNA, 20 bp, synthetic construct
  source 1..20: mol_type = other DNA
gaaaagtatccctgtcgcgc

SEQ ID NO: 294494 - DNA, 20 bp, synthetic construct
  source 1..20: mol_type = other DNA
tgaaaagtatccctgtcgcg

SEQ ID NO: 294495 - DNA, 20 bp, synthetic construct
  source 1..20: mol_type = other DNA
ctgaaaagtatccctgtcgc

SEQ ID NO: 294496 - DNA, 20 bp, synthetic construct
  source 1..20: mol_type = other DNA
gctgaaaagtatccctgtcg

SEQ ID NO: 294497 - DNA, 20 bp, synthetic construct
  source 1..20: mol_type = other DNA
cgctgaaaagtatccctgtc

SEQ ID NO: 294498 - DNA, 20 bp, synthetic construct
  source 1..20: mol_type = other DNA
ccgctgaaaagtatccctgt

SEQ ID NO: 294499 - DNA, 20 bp, synthetic construct
  source 1..20: mol_type = other DNA
gccgctgaaaagtatccctg

SEQ ID NO: 294500 - DNA, 20 bp, synthetic construct
  source 1..20: mol_type = other DNA
agccgctgaaaagtatccct

SEQ ID NO: 294501 - DNA, 20 bp, synthetic construct
  source 1..20: mol_type = other DNA
cagccgctgaaaagtatccc

SEQ ID NO: 294502 - DNA, 20 bp, synthetic construct
  source 1..20: mol_type = other DNA
ccagccgctgaaaagtatcc

SEQ ID NO: 294503 - DNA, 20 bp, synthetic construct
  source 1..20: mol_type = other DNA
cccagccgctgaaaagtatc

SEQ ID NO: 294504 - DNA, 20 bp, synthetic construct
  source 1..20: mol_type = other DNA
acccagccgctgaaaagtat

SEQ ID NO: 294505 - DNA, 20 bp, synthetic construct
  source 1..20: mol_type = other DNA
gacccagccgctgaaaagta

SEQ ID NO: 294506 - DNA, 20 bp, synthetic construct
  source 1..20: mol_type = other DNA
cgacccagccgctgaaaagt

SEQ ID NO: 294507 - DNA, 20 bp, synthetic construct
  source 1..20: mol_type = other DNA
gcgacccagccgctgaaaag

SEQ ID NO: 294508 - DNA, 20 bp, synthetic construct
  source 1..20: mol_type = other DNA
agcgacccagccgctgaaaa

SEQ ID NO: 294509 - DNA, 20 bp, synthetic construct
  source 1..20: mol_type = other DNA
tagcgacccagccgctgaaa

SEQ ID NO: 294510 - DNA, 20 bp, synthetic construct
  source 1..20: mol_type = other DNA
atagcgacccagccgctgaa

SEQ ID NO: 294511 - DNA, 20 bp, synthetic construct
  source 1..20: mol_type = other DNA
gatagcgacccagccgctga

SEQ ID NO: 294512 - DNA, 20 bp, synthetic construct
  source 1..20: mol_type = other DNA
ggatagcgacccagccgctg

SEQ ID NO: 294513 - DNA, 20 bp, synthetic construct
  source 1..20: mol_type = other DNA
tggatagcgacccagccgct

SEQ ID NO: 294514 - DNA, 20 bp, synthetic construct
  source 1..20: mol_type = other DNA
ttggatagcgacccagccgc

SEQ ID NO: 294515 - DNA, 20 bp, synthetic construct
  source 1..20: mol_type = other DNA
tttggatagcgacccagccg

SEQ ID NO: 294516 - DNA, 20 bp, synthetic construct
  source 1..20: mol_type = other DNA
ctttggatagcgacccagcc

SEQ ID NO: 294517 - DNA, 20 bp, synthetic construct
  source 1..20: mol_type = other DNA
actttggatagcgacccagc

SEQ ID NO: 294518 - DNA, 20 bp, synthetic construct
  source 1..20: mol_type = other DNA
cactttggatagcgacccag

SEQ ID NO: 294519 - DNA, 20 bp, synthetic construct
  source 1..20: mol_type = other DNA
tcactttggatagcgaccca

SEQ ID NO: 294520 - DNA, 20 bp, synthetic construct
  source 1..20: mol_type = other DNA
ctcactttggatagcgaccc

SEQ ID NO: 294521 - DNA, 20 bp, synthetic construct
  source 1..20: mol_type = other DNA
tctcactttggatagcgacc

SEQ ID NO: 294522 - DNA, 20 bp, synthetic construct
  source 1..20: mol_type = other DNA
ttctcactttggatagcgac

SEQ ID NO: 294523 - DNA, 20 bp, synthetic construct
  source 1..20: mol_type = other DNA
tttctcactttggatagcga

SEQ ID NO: 294524 - DNA, 20 bp, synthetic construct
  source 1..20: mol_type = other DNA
ttttctcactttggatagcg

SEQ ID NO: 294525 - DNA, 20 bp, synthetic construct
  source 1..20: mol_type = other DNA
gttttctcactttggatagc

SEQ ID NO: 294526 - DNA, 20 bp, synthetic construct
  source 1..20: mol_type = other DNA
cgttttctcactttggatag

SEQ ID NO: 294527 - DNA, 20 bp, synthetic construct
  source 1..20: mol_type = other DNA
tcgttttctcactttggata

SEQ ID NO: 294528 - DNA, 20 bp, synthetic construct
  source 1..20: mol_type = other DNA
ctcgttttctcactttggat

SEQ ID NO: 294529 - DNA, 20 bp, synthetic construct
  source 1..20: mol_type = other DNA
cctcgttttctcactttgga

SEQ ID NO: 294530 - DNA, 20 bp, synthetic construct
  source 1..20: mol_type = other DNA
tcctcgttttctcactttgg

SEQ ID NO: 294531 - DNA, 20 bp, synthetic construct
  source 1..20: mol_type = other DNA
ctcctcgttttctcactttg

SEQ ID NO: 294532 - DNA, 20 bp, synthetic construct
  source 1..20: mol_type = other DNA
cctcctcgttttctcacttt

SEQ ID NO: 294533 - DNA, 20 bp, synthetic construct
  source 1..20: mol_type = other DNA
ccctcctcgttttctcactt

SEQ ID NO: 294534 - DNA, 20 bp, synthetic construct
  source 1..20: mol_type = other DNA
tccctcctcgttttctcact

SEQ ID NO: 294535 - DNA, 20 bp, synthetic construct
  source 1..20: mol_type = other DNA
gtccctcctcgttttctcac

SEQ ID NO: 294536 - DNA, 20 bp, synthetic construct
  source 1..20: mol_type = other DNA
ggtccctcctcgttttctca

SEQ ID NO: 294537 - DNA, 20 bp, synthetic construct
  source 1..20: mol_type = other DNA
tggtccctcctcgttttctc

SEQ ID NO: 294538 - DNA, 20 bp, synthetic construct
  source 1..20: mol_type = other DNA
ctggtccctcctcgttttct

SEQ ID NO: 294539 - DNA, 20 bp, synthetic construct
  source 1..20: mol_type = other DNA
cctggtccctcctcgttttc

SEQ ID NO: 294540 - DNA, 20 bp, synthetic construct
  source 1..20: mol_type = other DNA
tcctggtccctcctcgtttt

SEQ ID NO: 294541 - DNA, 20 bp, synthetic construct
  source 1..20: mol_type = other DNA
ctcctggtccctcctcgttt

SEQ ID NO: 294542 - DNA, 20 bp, synthetic construct
  source 1..20: mol_type = other DNA
cctcctggtccctcctcgtt

SEQ ID NO: 294543 - DNA, 20 bp, synthetic construct
  source 1..20: mol_type = other DNA
gcctcctggtccctcctcgt

SEQ ID NO: 294544 - DNA, 20 bp, synthetic construct
  source 1..20: mol_type = other DNA
agcctcctggtccctcctcg

SEQ ID NO: 294545 - DNA, 20 bp, synthetic construct
  source 1..20: mol_type = other DNA
cagcctcctggtccctcctc

SEQ ID NO: 294546 - DNA, 20 bp, synthetic construct
  source 1..20: mol_type = other DNA
acagcctcctggtccctcct

SEQ ID NO: 294547 - DNA, 20 bp, synthetic construct
  source 1..20: mol_type = other DNA
gacagcctcctggtccctcc

SEQ ID NO: 294548 - DNA, 20 bp, synthetic construct
  source 1..20: mol_type = other DNA
ggacagcctcctggtccctc

SEQ ID NO: 294549 - DNA, 20 bp, synthetic construct
  source 1..20: mol_type = other DNA
cggacagcctcctggtccct

SEQ ID NO: 294550 - DNA, 20 bp, synthetic construct
  source 1..20: mol_type = other DNA
gcggacagcctcctggtccc

SEQ ID NO: 294551 - DNA, 20 bp, synthetic construct
  source 1..20: mol_type = other DNA
ggcggacagcctcctggtcc

SEQ ID NO: 294552 - DNA, 20 bp, synthetic construct
  source 1..20: mol_type = other DNA
aggcggacagcctcctggtc

SEQ ID NO: 294553 - DNA, 20 bp, synthetic construct
  source 1..20: mol_type = other DNA
gaggcggacagcctcctggt

SEQ ID NO: 294554 - DNA, 20 bp, synthetic construct
  source 1..20: mol_type = other DNA
tgaggcggacagcctcctgg

SEQ ID NO: 294555 - DNA, 20 bp, synthetic construct
  source 1..20: mol_type = other DNA
ttgaggcggacagcctcctg

SEQ ID NO: 294556 - DNA, 20 bp, synthetic construct
  source 1..20: mol_type = other DNA
cttgaggcggacagcctcct

SEQ ID NO: 294557 - DNA, 20 bp, synthetic construct
  source 1..20: mol_type = other DNA
tcttgaggcggacagcctcc

SEQ ID NO: 294558 - DNA, 20 bp, synthetic construct
  source 1..20: mol_type = other DNA
ctcttgaggcggacagcctc

SEQ ID NO: 294559 - DNA, 20 bp, synthetic construct
  source 1..20: mol_type = other DNA
tctcttgaggcggacagcct

SEQ ID NO: 294560 - DNA, 20 bp, synthetic construct
  source 1..20: mol_type = other DNA
atctcttgaggcggacagcc

SEQ ID NO: 294561 - DNA, 20 bp, synthetic construct
  source 1..20: mol_type = other DNA
catctcttgaggcggacagc

SEQ ID NO: 294562 - DNA, 20 bp, synthetic construct
  source 1..20: mol_type = other DNA
acatctcttgaggcggacag

SEQ ID NO: 294563 - DNA, 20 bp, synthetic construct
  source 1..20: mol_type = other DNA
cacatctcttgaggcggaca

SEQ ID NO: 294564 - DNA, 20 bp, synthetic construct
  source 1..20: mol_type = other DNA
ccacatctcttgaggcggac

SEQ ID NO: 294565 - DNA, 20 bp, synthetic construct
  source 1..20: mol_type = other DNA
cccacatctcttgaggcgga

SEQ ID NO: 294566 - DNA, 20 bp, synthetic construct
  source 1..20: mol_type = other DNA
ccccacatctcttgaggcgg

SEQ ID NO: 294567 - DNA, 20 bp, synthetic construct
  source 1..20: mol_type = other DNA
cccccacatctcttgaggcg

SEQ ID NO: 294568 - DNA, 20 bp, synthetic construct
  source 1..20: mol_type = other DNA
gcccccacatctcttgaggc

SEQ ID NO: 294569 - DNA, 20 bp, synthetic construct
  source 1..20: mol_type = other DNA
ggcccccacatctcttgagg

SEQ ID NO: 294570 - DNA, 20 bp, synthetic construct
  source 1..20: mol_type = other DNA
tggcccccacatctcttgag

SEQ ID NO: 294571 - DNA, 20 bp, synthetic construct
  source 1..20: mol_type = other DNA
ctggcccccacatctcttga

SEQ ID NO: 294572 - DNA, 20 bp, synthetic construct
  source 1..20: mol_type = other DNA
cctggcccccacatctcttg

SEQ ID NO: 294573 - DNA, 20 bp, synthetic construct
  source 1..20: mol_type = other DNA
acctggcccccacatctctt

SEQ ID NO: 294574 - DNA, 20 bp, synthetic construct
  source 1..20: mol_type = other DNA
gacctggcccccacatctct

SEQ ID NO: 294575 - DNA, 20 bp, synthetic construct
  source 1..20: mol_type = other DNA
ggacctggcccccacatctc

SEQ ID NO: 294576 - DNA, 20 bp, synthetic construct
  source 1..20: mol_type = other DNA
tggacctggcccccacatct

SEQ ID NO: 294577 - DNA, 20 bp, synthetic construct
  source 1..20: mol_type = other DNA
ctggacctggcccccacatc

SEQ ID NO: 294578 - DNA, 20 bp, synthetic construct
  source 1..20: mol_type = other DNA
actggacctggcccccacat

SEQ ID NO: 294579 - DNA, 20 bp, synthetic construct
  source 1..20: mol_type = other DNA
aactggacctggcccccaca

SEQ ID NO: 294580 - DNA, 20 bp, synthetic construct
  source 1..20: mol_type = other DNA
taactggacctggcccccac

SEQ ID NO: 294581 - DNA, 20 bp, synthetic construct
  source 1..20: mol_type = other DNA
ataactggacctggccccca

SEQ ID NO: 294582 - DNA, 20 bp, synthetic construct
  source 1..20: mol_type = other DNA
gataactggacctggccccc

SEQ ID NO: 294583 - DNA, 20 bp, synthetic construct
  source 1..20: mol_type = other DNA
agataactggacctggcccc

SEQ ID NO: 294584 - DNA, 20 bp, synthetic construct
  source 1..20: mol_type = other DNA
cagataactggacctggccc

SEQ ID NO: 294585 - DNA, 20 bp, synthetic construct
  source 1..20: mol_type = other DNA
ccagataactggacctggcc

SEQ ID NO: 294586 - DNA, 20 bp, synthetic construct
  source 1..20: mol_type = other DNA
cccagataactggacctggc

SEQ ID NO: 294587 - DNA, 20 bp, synthetic construct
  source 1..20: mol_type = other DNA
ccccagataactggacctgg

SEQ ID NO: 294588 - DNA, 20 bp, synthetic construct
  source 1..20: mol_type = other DNA
tccccagataactggacctg

SEQ ID NO: 294589 - DNA, 20 bp, synthetic construct
  source 1..20: mol_type = other DNA
ttccccagataactggacct

SEQ ID NO: 294590 - DNA, 20 bp, synthetic construct
  source 1..20: mol_type = other DNA
cttccccagataactggacc

SEQ ID NO: 294591 - DNA, 20 bp, synthetic construct
  source 1..20: mol_type = other DNA
gcttccccagataactggac

SEQ ID NO: 294592 - DNA, 20 bp, synthetic construct
  source 1..20: mol_type = other DNA
tgcttccccagataactgga

SEQ ID NO: 294593 - DNA, 20 bp, synthetic construct
  source 1..20: mol_type = other DNA
ctgcttccccagataactgg

SEQ ID NO: 294594 - DNA, 20 bp, synthetic construct
  source 1..20: mol_type = other DNA
actgcttccccagataactg

SEQ ID NO: 294595 - DNA, 20 bp, synthetic construct
  source 1..20: mol_type = other DNA
tactgcttccccagataact

SEQ ID NO: 294596 - DNA, 20 bp, synthetic construct
  source 1..20: mol_type = other DNA
ttactgcttccccagataac

SEQ ID NO: 294597 - DNA, 20 bp, synthetic construct
  source 1..20: mol_type = other DNA
cttactgcttccccagataa

SEQ ID NO: 294598 - DNA, 20 bp, synthetic construct
  source 1..20: mol_type = other DNA
gcttactgcttccccagata

SEQ ID NO: 294599 - DNA, 20 bp, synthetic construct
  source 1..20: mol_type = other DNA
agcttactgcttccccagat

SEQ ID NO: 294600 - DNA, 20 bp, synthetic construct
  source 1..20: mol_type = other DNA
aagcttactgcttccccaga

SEQ ID NO: 294601 - DNA, 20 bp, synthetic construct
  source 1..20: mol_type = other DNA
gaagcttactgcttccccag

SEQ ID NO: 294602 - DNA, 20 bp, synthetic construct
  source 1..20: mol_type = other DNA
agaagcttactgcttcccca

SEQ ID NO: 294603 - DNA, 20 bp, synthetic construct
  source 1..20: mol_type = other DNA
gagaagcttactgcttcccc

SEQ ID NO: 294604 - DNA, 20 bp, synthetic construct
  source 1..20: mol_type = other DNA
agagaagcttactgcttccc

SEQ ID NO: 294605 - DNA, 20 bp, synthetic construct
  source 1..20: mol_type = other DNA
cagagaagcttactgcttcc

SEQ ID NO: 294606 - DNA, 20 bp, synthetic construct
  source 1..20: mol_type = other DNA
gcagagaagcttactgcttc

SEQ ID NO: 294607 - DNA, 20 bp, synthetic construct
  source 1..20: mol_type = other DNA
agcagagaagcttactgctt

SEQ ID NO: 294608 - DNA, 20 bp, synthetic construct
  source 1..20: mol_type = other DNA
cagcagagaagcttactgct

SEQ ID NO: 294609 - DNA, 20 bp, synthetic construct
  source 1..20: mol_type = other DNA
acagcagagaagcttactgc

SEQ ID NO: 294610 - DNA, 20 bp, synthetic construct
  source 1..20: mol_type = other DNA
aacagcagagaagcttactg

SEQ ID NO: 294611 - DNA, 20 bp, synthetic construct
  source 1..20: mol_type = other DNA
aaacagcagagaagcttact

SEQ ID NO: 294612 - DNA, 20 bp, synthetic construct
  source 1..20: mol_type = other DNA
gaaacagcagagaagcttac

SEQ ID NO: 294613 - DNA, 20 bp, synthetic construct
  source 1..20: mol_type = other DNA
agaaacagcagagaagctta

SEQ ID NO: 294614 - DNA, 20 bp, synthetic construct
  source 1..20: mol_type = other DNA
tagaaacagcagagaagctt

SEQ ID NO: 294615 - DNA, 20 bp, synthetic construct
  source 1..20: mol_type = other DNA
ttagaaacagcagagaagct

SEQ ID NO: 294616 - DNA, 20 bp, synthetic construct
  source 1..20: mol_type = other DNA
gttagaaacagcagagaagc

SEQ ID NO: 294617 - DNA, 20 bp, synthetic construct
  source 1..20: mol_type = other DNA
ggttagaaacagcagagaag

SEQ ID NO: 294618 - DNA, 20 bp, synthetic construct
  source 1..20: mol_type = other DNA
gggttagaaacagcagagaa

SEQ ID NO: 294619 - DNA, 20 bp, synthetic construct
  source 1..20: mol_type = other DNA
ggggttagaaacagcagaga

SEQ ID NO: 294620 - DNA, 20 bp, synthetic construct
  source 1..20: mol_type = other DNA
tggggttagaaacagcagag

SEQ ID NO: 294621 - DNA, 20 bp, synthetic construct
  source 1..20: mol_type = other DNA
ctggggttagaaacagcaga

SEQ ID NO: 294622 - DNA, 20 bp, synthetic construct
  source 1..20: mol_type = other DNA
cctggggttagaaacagcag

SEQ ID NO: 294623 - DNA, 20 bp, synthetic construct
  source 1..20: mol_type = other DNA
gcctggggttagaaacagca

SEQ ID NO: 294624 - DNA, 20 bp, synthetic construct
  source 1..20: mol_type = other DNA
ggcctggggttagaaacagc

SEQ ID NO: 294625 - DNA, 20 bp, synthetic construct
  source 1..20: mol_type = other DNA
aggcctggggttagaaacag

SEQ ID NO: 294626 - DNA, 20 bp, synthetic construct
  source 1..20: mol_type = other DNA
gaggcctggggttagaaaca

SEQ ID NO: 294627 - DNA, 20 bp, synthetic construct
  source 1..20: mol_type = other DNA
ggaggcctggggttagaaac

SEQ ID NO: 294628 - DNA, 20 bp, synthetic construct
  source 1..20: mol_type = other DNA
gggaggcctggggttagaaa

SEQ ID NO: 294629 - DNA, 20 bp, synthetic construct
  source 1..20: mol_type = other DNA
ggggaggcctggggttagaa

SEQ ID NO: 294630 - DNA, 20 bp, synthetic construct
  source 1..20: mol_type = other DNA
aggggaggcctggggttaga

SEQ ID NO: 294631 - DNA, 20 bp, synthetic construct
  source 1..20: mol_type = other DNA
caggggaggcctggggttag

SEQ ID NO: 294632 - DNA, 20 bp, synthetic construct
  source 1..20: mol_type = other DNA
ccaggggaggcctggggtta

SEQ ID NO: 294633 - DNA, 20 bp, synthetic construct
  source 1..20: mol_type = other DNA
accaggggaggcctggggtt

SEQ ID NO: 294634 - DNA, 20 bp, synthetic construct
  source 1..20: mol_type = other DNA
gaccaggggaggcctggggt

SEQ ID NO: 294635 - DNA, 20 bp, synthetic construct
  source 1..20: mol_type = other DNA
agaccaggggaggcctgggg

SEQ ID NO: 294636 - DNA, 20 bp, synthetic construct
  source 1..20: mol_type = other DNA
tagaccaggggaggcctggg

SEQ ID NO: 294637 - DNA, 20 bp, synthetic construct
  source 1..20: mol_type = other DNA
ttagaccaggggaggcctgg

SEQ ID NO: 294638 - DNA, 20 bp, synthetic construct
  source 1..20: mol_type = other DNA
cttagaccaggggaggcctg

SEQ ID NO: 294639 - DNA, 20 bp, synthetic construct
  source 1..20: mol_type = other DNA
ccttagaccaggggaggcct

SEQ ID NO: 294640 - DNA, 20 bp, synthetic construct
  source 1..20: mol_type = other DNA
gccttagaccaggggaggcc

SEQ ID NO: 294641 - DNA, 20 bp, synthetic construct
  source 1..20: mol_type = other DNA
tgccttagaccaggggaggc

SEQ ID NO: 294642 - DNA, 20 bp, synthetic construct
  source 1..20: mol_type = other DNA
ctgccttagaccaggggagg

SEQ ID NO: 294643 - DNA, 20 bp, synthetic construct
  source 1..20: mol_type = other DNA
cctgccttagaccaggggag

SEQ ID NO: 294644 - DNA, 20 bp, synthetic construct
  source 1..20: mol_type = other DNA
ccctgccttagaccagggga

SEQ ID NO: 294645 - DNA, 20 bp, synthetic construct
  source 1..20: mol_type = other DNA
gccctgccttagaccagggg

SEQ ID NO: 294646 - DNA, 20 bp, synthetic construct
  source 1..20: mol_type = other DNA
ggccctgccttagaccaggg

SEQ ID NO: 294647 - DNA, 20 bp, synthetic construct
  source 1..20: mol_type = other DNA
aggccctgccttagaccagg

SEQ ID NO: 294648 - DNA, 20 bp, synthetic construct
  source 1..20: mol_type = other DNA
gaggccctgccttagaccag

SEQ ID NO: 294649 - DNA, 20 bp, synthetic construct
  source 1..20: mol_type = other DNA
ggaggccctgccttagacca

SEQ ID NO: 294650 - DNA, 20 bp, synthetic construct
  source 1..20: mol_type = other DNA
gggaggccctgccttagacc

SEQ ID NO: 294651 - DNA, 20 bp, synthetic construct
  source 1..20: mol_type = other DNA
tgggaggccctgccttagac

SEQ ID NO: 294652 - DNA, 20 bp, synthetic construct
  source 1..20: mol_type = other DNA
ctgggaggccctgccttaga

SEQ ID NO: 294653 - DNA, 20 bp, synthetic construct
  source 1..20: mol_type = other DNA
gctgggaggccctgccttag

SEQ ID NO: 294654 - DNA, 20 bp, synthetic construct
  source 1..20: mol_type = other DNA
ggctgggaggccctgcctta

SEQ ID NO: 294655 - DNA, 20 bp, synthetic construct
  source 1..20: mol_type = other DNA
aggctgggaggccctgcctt

SEQ ID NO: 294656 - DNA, 20 bp, synthetic construct
  source 1..20: mol_type = other DNA
gaggctgggaggccctgcct

SEQ ID NO: 294657 - DNA, 20 bp, synthetic construct
  source 1..20: mol_type = other DNA
cgaggctgggaggccctgcc

SEQ ID NO: 294658 - DNA, 20 bp, synthetic construct
  source 1..20: mol_type = other DNA
ccgaggctgggaggccctgc

SEQ ID NO: 294659 - DNA, 20 bp, synthetic construct
  source 1..20: mol_type = other DNA
cccgaggctgggaggccctg

SEQ ID NO: 294660 - DNA, 20 bp, synthetic construct
  source 1..20: mol_type = other DNA
ccccgaggctgggaggccct

SEQ ID NO: 294661 - DNA, 20 bp, synthetic construct
  source 1..20: mol_type = other DNA
gccccgaggctgggaggccc

SEQ ID NO: 294662 - DNA, 20 bp, synthetic construct
  source 1..20: mol_type = other DNA
tgccccgaggctgggaggcc

SEQ ID NO: 294663 - DNA, 20 bp, synthetic construct
  source 1..20: mol_type = other DNA
gtgccccgaggctgggaggc

SEQ ID NO: 294664 - DNA, 20 bp, synthetic construct
  source 1..20: mol_type = other DNA
agtgccccgaggctgggagg

SEQ ID NO: 294665 - DNA, 20 bp, synthetic construct
  source 1..20: mol_type = other DNA
aagtgccccgaggctgggag

SEQ ID NO: 294666 - DNA, 20 bp, synthetic construct
  source 1..20: mol_type = other DNA
aaagtgccccgaggctggga

SEQ ID NO: 294667 - DNA, 20 bp, synthetic construct
  source 1..20: mol_type = other DNA
taaagtgccccgaggctggg

SEQ ID NO: 294668 - DNA, 20 bp, synthetic construct
  source 1..20: mol_type = other DNA
ttaaagtgccccgaggctgg

SEQ ID NO: 294669 - DNA, 20 bp, synthetic construct
  source 1..20: mol_type = other DNA
tttaaagtgccccgaggctg

SEQ ID NO: 294670 - DNA, 20 bp, synthetic construct
  source 1..20: mol_type = other DNA
ctttaaagtgccccgaggct

SEQ ID NO: 294671 - DNA, 20 bp, synthetic construct
  source 1..20: mol_type = other DNA
tctttaaagtgccccgaggc

SEQ ID NO: 294672 - DNA, 20 bp, synthetic construct
  source 1..20: mol_type = other DNA
atctttaaagtgccccgagg

SEQ ID NO: 294673 - DNA, 20 bp, synthetic construct
  source 1..20: mol_type = other DNA
tatctttaaagtgccccgag

SEQ ID NO: 294674 - DNA, 20 bp, synthetic construct
  source 1..20: mol_type = other DNA
atatctttaaagtgccccga

SEQ ID NO: 294675 - DNA, 20 bp, synthetic construct
  source 1..20: mol_type = other DNA
gatatctttaaagtgccccg

SEQ ID NO: 294676 - DNA, 20 bp, synthetic construct
  source 1..20: mol_type = other DNA
agatatctttaaagtgcccc

SEQ ID NO: 294677 - DNA, 20 bp, synthetic construct
  source 1..20: mol_type = other DNA
cagatatctttaaagtgccc

SEQ ID NO: 294678 - DNA, 20 bp, synthetic construct
  source 1..20: mol_type = other DNA
ccagatatctttaaagtgcc

SEQ ID NO: 294679 - DNA, 20 bp, synthetic construct
  source 1..20: mol_type = other DNA
cccagatatctttaaagtgc

SEQ ID NO: 294680 - DNA, 20 bp, synthetic construct
  source 1..20: mol_type = other DNA
gcccagatatctttaaagtg

SEQ ID NO: 294681 - DNA, 20 bp, synthetic construct
  source 1..20: mol_type = other DNA
ggcccagatatctttaaagt

SEQ ID NO: 294682 - DNA, 20 bp, synthetic construct
  source 1..20: mol_type = other DNA
aggcccagatatctttaaag

SEQ ID NO: 294683 - DNA, 20 bp, synthetic construct
  source 1..20: mol_type = other DNA
caggcccagatatctttaaa

SEQ ID NO: 294684 - DNA, 20 bp, synthetic construct
  source 1..20: mol_type = other DNA
ccaggcccagatatctttaa

SEQ ID NO: 294685 - DNA, 20 bp, synthetic construct
  source 1..20: mol_type = other DNA
gccaggcccagatatcttta

SEQ ID NO: 294686 - DNA, 20 bp, synthetic construct
  source 1..20: mol_type = other DNA
ggccaggcccagatatcttt

SEQ ID NO: 294687 - DNA, 20 bp, synthetic construct
  source 1..20: mol_type = other DNA
gggccaggcccagatatctt

SEQ ID NO: 294688 - DNA, 20 bp, synthetic construct
  source 1..20: mol_type = other DNA
ggggccaggcccagatatct

SEQ ID NO: 294689 - DNA, 20 bp, synthetic construct
  source 1..20: mol_type = other DNA
tggggccaggcccagatatc

SEQ ID NO: 294690 - DNA, 20 bp, synthetic construct
  source 1..20: mol_type = other DNA
atggggccaggcccagatat

SEQ ID NO: 294691 - DNA, 20 bp, synthetic construct
  source 1..20: mol_type = other DNA
gatggggccaggcccagata

SEQ ID NO: 294692 - DNA, 20 bp, synthetic construct
  source 1..20: mol_type = other DNA
ggatggggccaggcccagat

SEQ ID NO: 294693 - DNA, 20 bp, synthetic construct
  source 1..20: mol_type = other DNA
gggatggggccaggcccaga

SEQ ID NO: 294694 - DNA, 20 bp, synthetic construct
  source 1..20: mol_type = other DNA
ggggatggggccaggcccag

SEQ ID NO: 294695 - DNA, 20 bp, synthetic construct
  source 1..20: mol_type = other DNA
tggggatggggccaggccca

SEQ ID NO: 294696 - DNA, 20 bp, synthetic construct
  source 1..20: mol_type = other DNA
gtggggatggggccaggccc

SEQ ID NO: 294697 - DNA, 20 bp, synthetic construct
  source 1..20: mol_type = other DNA
tgtggggatggggccaggcc

SEQ ID NO: 294698 - DNA, 20 bp, synthetic construct
  source 1..20: mol_type = other DNA
ctgtggggatggggccaggc

SEQ ID NO: 294699 - DNA, 20 bp, synthetic construct
  source 1..20: mol_type = other DNA
actgtggggatggggccagg

SEQ ID NO: 294700 - DNA, 20 bp, synthetic construct
  source 1..20: mol_type = other DNA
gactgtggggatggggccag

SEQ ID NO: 294701 - DNA, 20 bp, synthetic construct
  source 1..20: mol_type = other DNA
agactgtggggatggggcca

SEQ ID NO: 294702 - DNA, 20 bp, synthetic construct
  source 1..20: mol_type = other DNA
cagactgtggggatggggcc

SEQ ID NO: 294703 - DNA, 20 bp, synthetic construct
  source 1..20: mol_type = other DNA
tcagactgtggggatggggc

SEQ ID NO: 294704 - DNA, 20 bp, synthetic construct
  source 1..20: mol_type = other DNA
gtcagactgtggggatgggg

SEQ ID NO: 294705 - DNA, 20 bp, synthetic construct
  source 1..20: mol_type = other DNA
agtcagactgtggggatggg

SEQ ID NO: 294706 - DNA, 20 bp, synthetic construct
  source 1..20: mol_type = other DNA
cagtcagactgtggggatgg

SEQ ID NO: 294707 - DNA, 20 bp, synthetic construct
  source 1..20: mol_type = other DNA
tcagtcagactgtggggatg

SEQ ID NO: 294708 - DNA, 20 bp, synthetic construct
  source 1..20: mol_type = other DNA
ctcagtcagactgtggggat

SEQ ID NO: 294709 - DNA, 20 bp, synthetic construct
  source 1..20: mol_type = other DNA
actcagtcagactgtgggga

SEQ ID NO: 294710 - DNA, 20 bp, synthetic construct
  source 1..20: mol_type = other DNA
cactcagtcagactgtgggg

SEQ ID NO: 294711 - DNA, 20 bp, synthetic construct
  source 1..20: mol_type = other DNA
ccactcagtcagactgtggg

SEQ ID NO: 294712 - DNA, 20 bp, synthetic construct
  source 1..20: mol_type = other DNA
cccactcagtcagactgtgg

SEQ ID NO: 294713 - DNA, 20 bp, synthetic construct
  source 1..20: mol_type = other DNA
acccactcagtcagactgtg

SEQ ID NO: 294714 - DNA, 20 bp, synthetic construct
  source 1..20: mol_type = other DNA
gacccactcagtcagactgt

SEQ ID NO: 294715 - DNA, 20 bp, synthetic construct
  source 1..20: mol_type = other DNA
agacccactcagtcagactg

SEQ ID NO: 294716 - DNA, 20 bp, synthetic construct
  source 1..20: mol_type = other DNA
cagacccactcagtcagact

SEQ ID NO: 294717 - DNA, 20 bp, synthetic construct
  source 1..20: mol_type = other DNA
ccagacccactcagtcagac

SEQ ID NO: 294718 - DNA, 20 bp, synthetic construct
  source 1..20: mol_type = other DNA
tccagacccactcagtcaga

SEQ ID NO: 294719 - DNA, 20 bp, synthetic construct
  source 1..20: mol_type = other DNA
atccagacccactcagtcag

SEQ ID NO: 294720 - DNA, 20 bp, synthetic construct
  source 1..20: mol_type = other DNA
tatccagacccactcagtca

SEQ ID NO: 294721 - DNA, 20 bp, synthetic construct
  source 1..20: mol_type = other DNA
ctatccagacccactcagtc

SEQ ID NO: 294722 - DNA, 20 bp, synthetic construct
  source 1..20: mol_type = other DNA
cctatccagacccactcagt

SEQ ID NO: 294723 - DNA, 20 bp, synthetic construct
  source 1..20: mol_type = other DNA
ccctatccagacccactcag

SEQ ID NO: 294724 - DNA, 20 bp, synthetic construct
  source 1..20: mol_type = other DNA
gccctatccagacccactca

SEQ ID NO: 294725 - DNA, 20 bp, synthetic construct
  source 1..20: mol_type = other DNA
ggccctatccagacccactc

SEQ ID NO: 294726 - DNA, 20 bp, synthetic construct
  source 1..20: mol_type = other DNA
aggccctatccagacccact

SEQ ID NO: 294727 - DNA, 20 bp, synthetic construct
  source 1..20: mol_type = other DNA
caggccctatccagacccac

SEQ ID NO: 294728 - DNA, 20 bp, synthetic construct
  source 1..20: mol_type = other DNA
tcaggccctatccagaccca

SEQ ID NO: 294729 - DNA, 20 bp, synthetic construct
  source 1..20: mol_type = other DNA
ctcaggccctatccagaccc

SEQ ID NO: 294730 - DNA, 20 bp, synthetic construct
  source 1..20: mol_type = other DNA
gctcaggccctatccagacc

SEQ ID NO: 294731 - DNA, 20 bp, synthetic construct
  source 1..20: mol_type = other DNA
tgctcaggccctatccagac

SEQ ID NO: 294732 - DNA, 20 bp, synthetic construct
  source 1..20: mol_type = other DNA
atgctcaggccctatccaga

SEQ ID NO: 294733 - DNA, 20 bp, synthetic construct
  source 1..20: mol_type = other DNA
aatgctcaggccctatccag

SEQ ID NO: 294734 - DNA, 20 bp, synthetic construct
  source 1..20: mol_type = other DNA
caatgctcaggccctatcca

SEQ ID NO: 294735 - DNA, 20 bp, synthetic construct
  source 1..20: mol_type = other DNA
ccaatgctcaggccctatcc

SEQ ID NO: 294736 - DNA, 20 bp, synthetic construct
  source 1..20: mol_type = other DNA
accaatgctcaggccctatc

SEQ ID NO: 294737 - DNA, 20 bp, synthetic construct
  source 1..20: mol_type = other DNA
caccaatgctcaggccctat

SEQ ID NO: 294738 - DNA, 20 bp, synthetic construct
  source 1..20: mol_type = other DNA
tcaccaatgctcaggcccta

SEQ ID NO: 294739 - DNA, 20 bp, synthetic construct
  source 1..20: mol_type = other DNA
atcaccaatgctcaggccct

SEQ ID NO: 294740 - DNA, 20 bp, synthetic construct
  source 1..20: mol_type = other DNA
aatcaccaatgctcaggccc

SEQ ID NO: 294741 - DNA, 20 bp, synthetic construct
  source 1..20: mol_type = other DNA
aaatcaccaatgctcaggcc

SEQ ID NO: 294742 - DNA, 20 bp, synthetic construct
  source 1..20: mol_type = other DNA
gaaatcaccaatgctcaggc

SEQ ID NO: 294743 - DNA, 20 bp, synthetic construct
  source 1..20: mol_type = other DNA
ggaaatcaccaatgctcagg

SEQ ID NO: 294744 - DNA, 20 bp, synthetic construct
  source 1..20: mol_type = other DNA
aggaaatcaccaatgctcag

SEQ ID NO: 294745 - DNA, 20 bp, synthetic construct
  source 1..20: mol_type = other DNA
caggaaatcaccaatgctca

SEQ ID NO: 294746 - DNA, 20 bp, synthetic construct
  source 1..20: mol_type = other DNA
ccaggaaatcaccaatgctc

SEQ ID NO: 294747 - DNA, 20 bp, synthetic construct
  source 1..20: mol_type = other DNA
cccaggaaatcaccaatgct

SEQ ID NO: 294748 - DNA, 20 bp, synthetic construct
  source 1..20: mol_type = other DNA
acccaggaaatcaccaatgc

SEQ ID NO: 294749 - DNA, 20 bp, synthetic construct
  source 1..20: mol_type = other DNA
cacccaggaaatcaccaatg

SEQ ID NO: 294750 - DNA, 20 bp, synthetic construct
  source 1..20: mol_type = other DNA
tcacccaggaaatcaccaat

SEQ ID NO: 294751 - DNA, 20 bp, synthetic construct
  source 1..20: mol_type = other DNA
ttcacccaggaaatcaccaa

SEQ ID NO: 294752 - DNA, 20 bp, synthetic construct
  source 1..20: mol_type = other DNA
tttcacccaggaaatcacca

SEQ ID NO: 294753 - DNA, 20 bp, synthetic construct
  source 1..20: mol_type = other DNA
ctttcacccaggaaatcacc

SEQ ID NO: 294754 - DNA, 20 bp, synthetic construct
  source 1..20: mol_type = other DNA
cctttcacccaggaaatcac

SEQ ID NO: 294755 - DNA, 20 bp, synthetic construct
  source 1..20: mol_type = other DNA
tcctttcacccaggaaatca

SEQ ID NO: 294756 - DNA, 20 bp, synthetic construct
  source 1..20: mol_type = other DNA
ctcctttcacccaggaaatc

SEQ ID NO: 294757 - DNA, 20 bp, synthetic construct
  source 1..20: mol_type = other DNA
cctcctttcacccaggaaat

SEQ ID NO: 294758 - DNA, 20 bp, synthetic construct
  source 1..20: mol_type = other DNA
gcctcctttcacccaggaaa

SEQ ID NO: 294759 - DNA, 20 bp, synthetic construct
  source 1..20: mol_type = other DNA
ggcctcctttcacccaggaa

SEQ ID NO: 294760 - DNA, 20 bp, synthetic construct
  source 1..20: mol_type = other DNA
gggcctcctttcacccagga

SEQ ID NO: 294761 - DNA, 20 bp, synthetic construct
  source 1..20: mol_type = other DNA
ggggcctcctttcacccagg

SEQ ID NO: 294762 - DNA, 20 bp, synthetic construct
  source 1..20: mol_type = other DNA
aggggcctcctttcacccag

SEQ ID NO: 294763 - DNA, 20 bp, synthetic construct
  source 1..20: mol_type = other DNA
gaggggcctcctttcaccca

SEQ ID NO: 294764 - DNA, 20 bp, synthetic construct
  source 1..20: mol_type = other DNA
tgaggggcctcctttcaccc

SEQ ID NO: 294765 - DNA, 20 bp, synthetic construct
  source 1..20: mol_type = other DNA
gtgaggggcctcctttcacc

SEQ ID NO: 294766 - DNA, 20 bp, synthetic construct
  source 1..20: mol_type = other DNA
tgtgaggggcctcctttcac

SEQ ID NO: 294767 - DNA, 20 bp, synthetic construct
  source 1..20: mol_type = other DNA
ctgtgaggggcctcctttca

SEQ ID NO: 294768 - DNA, 20 bp, synthetic construct
  source 1..20: mol_type = other DNA
actgtgaggggcctcctttc

SEQ ID NO: 294769 - DNA, 20 bp, synthetic construct
  source 1..20: mol_type = other DNA
gactgtgaggggcctccttt

SEQ ID NO: 294770 - DNA, 20 bp, synthetic construct
  source 1..20: mol_type = other DNA
agactgtgaggggcctcctt

SEQ ID NO: 294771 - DNA, 20 bp, synthetic construct
  source 1..20: mol_type = other DNA
gagactgtgaggggcctcct

SEQ ID NO: 294772 - DNA, 20 bp, synthetic construct
  source 1..20: mol_type = other DNA
agagactgtgaggggcctcc

SEQ ID NO: 294773 - DNA, 20 bp, synthetic construct
  source 1..20: mol_type = other DNA
cagagactgtgaggggcctc

SEQ ID NO: 294774 - DNA, 20 bp, synthetic construct
  source 1..20: mol_type = other DNA
ccagagactgtgaggggcct

SEQ ID NO: 294775 - DNA, 20 bp, synthetic construct
  source 1..20: mol_type = other DNA
tccagagactgtgaggggcc

SEQ ID NO: 294776 - DNA, 20 bp, synthetic construct
  source 1..20: mol_type = other DNA
ttccagagactgtgaggggc

SEQ ID NO: 294777 - DNA, 20 bp, synthetic construct
  source 1..20: mol_type = other DNA
cttccagagactgtgagggg

SEQ ID NO: 294778 - DNA, 20 bp, synthetic construct
  source 1..20: mol_type = other DNA
gcttccagagactgtgaggg

SEQ ID NO: 294779 - DNA, 20 bp, synthetic construct
  source 1..20: mol_type = other DNA
agcttccagagactgtgagg

SEQ ID NO: 294780 - DNA, 20 bp, synthetic construct
  source 1..20: mol_type = other DNA
aagcttccagagactgtgag

SEQ ID NO: 294781 - DNA, 20 bp, synthetic construct
  source 1..20: mol_type = other DNA
gaagcttccagagactgtga

SEQ ID NO: 294782 - DNA, 20 bp, synthetic construct
  source 1..20: mol_type = other DNA
agaagcttccagagactgtg

SEQ ID NO: 294783 - DNA, 20 bp, synthetic construct
  source 1..20: mol_type = other DNA
gagaagcttccagagactgt

SEQ ID NO: 294784 - DNA, 20 bp, synthetic construct
  source 1..20: mol_type = other DNA
agagaagcttccagagactg

SEQ ID NO: 294785 - DNA, 20 bp, synthetic construct
  source 1..20: mol_type = other DNA
cagagaagcttccagagact

SEQ ID NO: 294786 - DNA, 20 bp, synthetic construct
  source 1..20: mol_type = other DNA
acagagaagcttccagagac

SEQ ID NO: 294787 - DNA, 20 bp, synthetic construct
  source 1..20: mol_type = other DNA
cacagagaagcttccagaga

SEQ ID NO: 294788 - DNA, 20 bp, synthetic construct
  source 1..20: mol_type = other DNA
acacagagaagcttccagag

SEQ ID NO: 294789 - DNA, 20 bp, synthetic construct
  source 1..20: mol_type = other DNA
aacacagagaagcttccaga

SEQ ID NO: 294790 - DNA, 20 bp, synthetic construct
  source 1..20: mol_type = other DNA
taacacagagaagcttccag

SEQ ID NO: 294791 - DNA, 20 bp, synthetic construct
  source 1..20: mol_type = other DNA
ctaacacagagaagcttcca

SEQ ID NO: 294792 - DNA, 20 bp, synthetic construct
  source 1..20: mol_type = other DNA
cctaacacagagaagcttcc

SEQ ID NO: 294793 - DNA, 20 bp, synthetic construct
  source 1..20: mol_type = other DNA
tcctaacacagagaagcttc

SEQ ID NO: 294794 - DNA, 20 bp, synthetic construct
  source 1..20: mol_type = other DNA
ttcctaacacagagaagctt

SEQ ID NO: 294795 - DNA, 20 bp, synthetic construct
  source 1..20: mol_type = other DNA
tttcctaacacagagaagct

SEQ ID NO: 294796 - DNA, 20 bp, synthetic construct
  source 1..20: mol_type = other DNA
ttttcctaacacagagaagc

SEQ ID NO: 294797 - DNA, 20 bp, synthetic construct
  source 1..20: mol_type = other DNA
cttttcctaacacagagaag

SEQ ID NO: 294798 - DNA, 20 bp, synthetic construct
  source 1..20: mol_type = other DNA
gcttttcctaacacagagaa

SEQ ID NO: 294799 - DNA, 20 bp, synthetic construct
  source 1..20: mol_type = other DNA
agcttttcctaacacagaga

SEQ ID NO: 294800 - DNA, 20 bp, synthetic construct
  source 1..20: mol_type = other DNA
gagcttttcctaacacagag

SEQ ID NO: 294801 - DNA, 20 bp, synthetic construct
  source 1..20: mol_type = other DNA
agagcttttcctaacacaga

SEQ ID NO: 294802 - DNA, 20 bp, synthetic construct
  source 1..20: mol_type = other DNA
cagagcttttcctaacacag

SEQ ID NO: 294803 - DNA, 20 bp, synthetic construct
  source 1..20: mol_type = other DNA
ccagagcttttcctaacaca

SEQ ID NO: 294804 - DNA, 20 bp, synthetic construct
  source 1..20: mol_type = other DNA
cccagagcttttcctaacac

SEQ ID NO: 294805 - DNA, 20 bp, synthetic construct
  source 1..20: mol_type = other DNA
gcccagagcttttcctaaca

SEQ ID NO: 294806 - DNA, 20 bp, synthetic construct
  source 1..20: mol_type = other DNA
agcccagagcttttcctaac

SEQ ID NO: 294807 - DNA, 20 bp, synthetic construct
  source 1..20: mol_type = other DNA
aagcccagagcttttcctaa

SEQ ID NO: 294808 - DNA, 20 bp, synthetic construct
  source 1..20: mol_type = other DNA
caagcccagagcttttccta

SEQ ID NO: 294809 - DNA, 20 bp, synthetic construct
  source 1..20: mol_type = other DNA
tcaagcccagagcttttcct

SEQ ID NO: 294810 - DNA, 20 bp, synthetic construct
  source 1..20: mol_type = other DNA
gtcaagcccagagcttttcc

SEQ ID NO: 294811 - DNA, 20 bp, synthetic construct
  source 1..20: mol_type = other DNA
agtcaagcccagagcttttc

SEQ ID NO: 294812 - DNA, 20 bp, synthetic construct
  source 1..20: mol_type = other DNA
gagtcaagcccagagctttt

SEQ ID NO: 294813 - DNA, 20 bp, synthetic construct
  source 1..20: mol_type = other DNA
agagtcaagcccagagcttt

SEQ ID NO: 294814 - DNA, 20 bp, synthetic construct
  source 1..20: mol_type = other DNA
cagagtcaagcccagagctt

SEQ ID NO: 294815 - DNA, 20 bp, synthetic construct
  source 1..20: mol_type = other DNA
gcagagtcaagcccagagct

SEQ ID NO: 294816 - DNA, 20 bp, synthetic construct
  source 1..20: mol_type = other DNA
agcagagtcaagcccagagc

SEQ ID NO: 294817 - DNA, 20 bp, synthetic construct
  source 1..20: mol_type = other DNA
aagcagagtcaagcccagag

SEQ ID NO: 294818 - DNA, 20 bp, synthetic construct
  source 1..20: mol_type = other DNA
aaagcagagtcaagcccaga

SEQ ID NO: 294819 - DNA, 20 bp, synthetic construct
  source 1..20: mol_type = other DNA
caaagcagagtcaagcccag

SEQ ID NO: 294820 - DNA, 20 bp, synthetic construct
  source 1..20: mol_type = other DNA
tcaaagcagagtcaagccca

SEQ ID NO: 294821 - DNA, 20 bp, synthetic construct
  source 1..20: mol_type = other DNA
ttcaaagcagagtcaagccc

SEQ ID NO: 294822 - DNA, 20 bp, synthetic construct
  source 1..20: mol_type = other DNA
tttcaaagcagagtcaagcc

SEQ ID NO: 294823 - DNA, 20 bp, synthetic construct
  source 1..20: mol_type = other DNA
ctttcaaagcagagtcaagc

SEQ ID NO: 294824 - DNA, 20 bp, synthetic construct
  source 1..20: mol_type = other DNA
actttcaaagcagagtcaag

SEQ ID NO: 294825 - DNA, 20 bp, synthetic construct
  source 1..20: mol_type = other DNA
gactttcaaagcagagtcaa

SEQ ID NO: 294826 - DNA, 20 bp, synthetic construct
  source 1..20: mol_type = other DNA
tgactttcaaagcagagtca

SEQ ID NO: 294827 - DNA, 20 bp, synthetic construct
  source 1..20: mol_type = other DNA
ttgactttcaaagcagagtc

SEQ ID NO: 294828 - DNA, 20 bp, synthetic construct
  source 1..20: mol_type = other DNA
cttgactttcaaagcagagt

SEQ ID NO: 294829 - DNA, 20 bp, synthetic construct
  source 1..20: mol_type = other DNA
tcttgactttcaaagcagag

SEQ ID NO: 294830 - DNA, 20 bp, synthetic construct
  source 1..20: mol_type = other DNA
atcttgactttcaaagcaga

SEQ ID NO: 294831 - DNA, 20 bp, synthetic construct
  source 1..20: mol_type = other DNA
gatcttgactttcaaagcag

SEQ ID NO: 294832 - DNA, 20 bp, synthetic construct
  source 1..20: mol_type = other DNA
ggatcttgactttcaaagca

SEQ ID NO: 294833 - DNA, 20 bp, synthetic construct
  source 1..20: mol_type = other DNA
cggatcttgactttcaaagc

SEQ ID NO: 294834 - DNA, 20 bp, synthetic construct
  source 1..20: mol_type = other DNA
gcggatcttgactttcaaag

SEQ ID NO: 294835 - DNA, 20 bp, synthetic construct
  source 1..20: mol_type = other DNA
tgcggatcttgactttcaaa

SEQ ID NO: 294836 - DNA, 20 bp, synthetic construct
  source 1..20: mol_type = other DNA
ttgcggatcttgactttcaa

SEQ ID NO: 294837 - DNA, 20 bp, synthetic construct
  source 1..20: mol_type = other DNA
tttgcggatcttgactttca

SEQ ID NO: 294838 - DNA, 20 bp, synthetic construct
  source 1..20: mol_type = other DNA
atttgcggatcttgactttc

SEQ ID NO: 294839 - DNA, 20 bp, synthetic construct
  source 1..20: mol_type = other DNA
gatttgcggatcttgacttt

SEQ ID NO: 294840 - DNA, 20 bp, synthetic construct
  source 1..20: mol_type = other DNA
ggatttgcggatcttgactt

SEQ ID NO: 294841 - DNA, 20 bp, synthetic construct
  source 1..20: mol_type = other DNA
aggatttgcggatcttgact

SEQ ID NO: 294842 - DNA, 20 bp, synthetic construct
  source 1..20: mol_type = other DNA
gaggatttgcggatcttgac

SEQ ID NO: 294843 - DNA, 20 bp, synthetic construct
  source 1..20: mol_type = other DNA
agaggatttgcggatcttga

SEQ ID NO: 294844 - DNA, 20 bp, synthetic construct
  source 1..20: mol_type = other DNA
gagaggatttgcggatcttg

SEQ ID NO: 294845 - DNA, 20 bp, synthetic construct
  source 1..20: mol_type = other DNA
tgagaggatttgcggatctt

SEQ ID NO: 294846 - DNA, 20 bp, synthetic construct
  source 1..20: mol_type = other DNA
ctgagaggatttgcggatct

SEQ ID NO: 294847 - DNA, 20 bp, synthetic construct
  source 1..20: mol_type = other DNA
gctgagaggatttgcggatc

SEQ ID NO: 294848 - DNA, 20 bp, synthetic construct
  source 1..20: mol_type = other DNA
ggctgagaggatttgcggat

SEQ ID NO: 294849 - DNA, 20 bp, synthetic construct
  source 1..20: mol_type = other DNA
aggctgagaggatttgcgga

SEQ ID NO: 294850 - DNA, 20 bp, synthetic construct
  source 1..20: mol_type = other DNA
gaggctgagaggatttgcgg

SEQ ID NO: 294851 - DNA, 20 bp, synthetic construct
  source 1..20: mol_type = other DNA
tgaggctgagaggatttgcg

SEQ ID NO: 294852 - DNA, 20 bp, synthetic construct
  source 1..20: mol_type = other DNA
ctgaggctgagaggatttgc

SEQ ID NO: 294853 - DNA, 20 bp, synthetic construct
  source 1..20: mol_type = other DNA
actgaggctgagaggatttg

SEQ ID NO: 294854 - DNA, 20 bp, synthetic construct
  source 1..20: mol_type = other DNA
aactgaggctgagaggattt

SEQ ID NO: 294855 - DNA, 20 bp, synthetic construct
  source 1..20: mol_type = other DNA
aaactgaggctgagaggatt

SEQ ID NO: 294856 - DNA, 20 bp, synthetic construct
  source 1..20: mol_type = other DNA
gaaactgaggctgagaggat

SEQ ID NO: 294857 - DNA, 20 bp, synthetic construct
  source 1..20: mol_type = other DNA
agaaactgaggctgagagga

SEQ ID NO: 294858 - DNA, 20 bp, synthetic construct
  source 1..20: mol_type = other DNA
gagaaactgaggctgagagg

SEQ ID NO: 294859 - DNA, 20 bp, synthetic construct
  source 1..20: mol_type = other DNA
ggagaaactgaggctgagag

SEQ ID NO: 294860 - DNA, 20 bp, synthetic construct
  source 1..20: mol_type = other DNA
aggagaaactgaggctgaga

SEQ ID NO: 294861 - DNA, 20 bp, synthetic construct
  source 1..20: mol_type = other DNA
aaggagaaactgaggctgag

SEQ ID NO: 294862 - DNA, 20 bp, synthetic construct
  source 1..20: mol_type = other DNA
gaaggagaaactgaggctga

SEQ ID NO: 294863 - DNA, 20 bp, synthetic construct
  source 1..20: mol_type = other DNA
tgaaggagaaactgaggctg

SEQ ID NO: 294864 - DNA, 20 bp, synthetic construct
  source 1..20: mol_type = other DNA
ctgaaggagaaactgaggct

SEQ ID NO: 294865 - DNA, 20 bp, synthetic construct
  source 1..20: mol_type = other DNA
gctgaaggagaaactgaggc

SEQ ID NO: 294866 - DNA, 20 bp, synthetic construct
  source 1..20: mol_type = other DNA
tgctgaaggagaaactgagg

SEQ ID NO: 294867 - DNA, 20 bp, synthetic construct
  source 1..20: mol_type = other DNA
ttgctgaaggagaaactgag

SEQ ID NO: 294868 - DNA, 20 bp, synthetic construct
  source 1..20: mol_type = other DNA
cttgctgaaggagaaactga

SEQ ID NO: 294869 - DNA, 20 bp, synthetic construct
  source 1..20: mol_type = other DNA
tcttgctgaaggagaaactg

SEQ ID NO: 294870 - DNA, 20 bp, synthetic construct
  source 1..20: mol_type = other DNA
atcttgctgaaggagaaact

SEQ ID NO: 294871 - DNA, 20 bp, synthetic construct
  source 1..20: mol_type = other DNA
catcttgctgaaggagaaac

SEQ ID NO: 294872 - DNA, 20 bp, synthetic construct
  source 1..20: mol_type = other DNA
tcatcttgctgaaggagaaa

SEQ ID NO: 294873 - DNA, 20 bp, synthetic construct
  source 1..20: mol_type = other DNA
ttcatcttgctgaaggagaa

SEQ ID NO: 294874 - DNA, 20 bp, synthetic construct
  source 1..20: mol_type = other DNA
tttcatcttgctgaaggaga

SEQ ID NO: 294875 - DNA, 20 bp, synthetic construct
  source 1..20: mol_type = other DNA
atttcatcttgctgaaggag

SEQ ID NO: 294876 - DNA, 20 bp, synthetic construct
  source 1..20: mol_type = other DNA
catttcatcttgctgaagga

SEQ ID NO: 294877 - DNA, 20 bp, synthetic construct
  source 1..20: mol_type = other DNA
ccatttcatcttgctgaagg

SEQ ID NO: 294878 - DNA, 20 bp, synthetic construct
  source 1..20: mol_type = other DNA
tccatttcatcttgctgaag

SEQ ID NO: 294879 - DNA, 20 bp, synthetic construct
  source 1..20: mol_type = other DNA
ttccatttcatcttgctgaa

SEQ ID NO: 294880 - DNA, 20 bp, synthetic construct
  source 1..20: mol_type = other DNA
tttccatttcatcttgctga

SEQ ID NO: 294881 - DNA, 20 bp, synthetic construct
  source 1..20: mol_type = other DNA
atttccatttcatcttgctg

SEQ ID NO: 294882 - DNA, 20 bp, synthetic construct
  source 1..20: mol_type = other DNA
catttccatttcatcttgct

SEQ ID NO: 294883 - DNA, 20 bp, synthetic construct
  source 1..20: mol_type = other DNA
gcatttccatttcatcttgc

SEQ ID NO: 294884 - DNA, 20 bp, synthetic construct
  source 1..20: mol_type = other DNA
agcatttccatttcatcttg

SEQ ID NO: 294885 - DNA, 20 bp, synthetic construct
  source 1..20: mol_type = other DNA
cagcatttccatttcatctt

SEQ ID NO: 294886 - DNA, 20 bp, synthetic construct
  source 1..20: mol_type = other DNA
acagcatttccatttcatct

SEQ ID NO: 294887 - DNA, 20 bp, synthetic construct
  source 1..20: mol_type = other DNA
tacagcatttccatttcatc

SEQ ID NO: 294888 - DNA, 20 bp, synthetic construct
  source 1..20: mol_type = other DNA
gtacagcatttccatttcat

SEQ ID NO: 294889 - DNA, 20 bp, synthetic construct
  source 1..20: mol_type = other DNA
ggtacagcatttccatttca

SEQ ID NO: 294890 - DNA, 20 bp, synthetic construct
  source 1..20: mol_type = other DNA
aggtacagcatttccatttc

SEQ ID NO: 294891 - DNA, 20 bp, synthetic construct
  source 1..20: mol_type = other DNA
taggtacagcatttccattt

SEQ ID NO: 294892 - DNA, 20 bp, synthetic construct
  source 1..20: mol_type = other DNA
gtaggtacagcatttccatt

SEQ ID NO: 294893 - DNA, 20 bp, synthetic construct
  source 1..20: mol_type = other DNA
cgtaggtacagcatttccat

SEQ ID NO: 294894 - DNA, 20 bp, synthetic construct
  source 1..20: mol_type = other DNA
acgtaggtacagcatttcca

SEQ ID NO: 294895 - DNA, 20 bp, synthetic construct
  source 1..20: mol_type = other DNA
gacgtaggtacagcatttcc

SEQ ID NO: 294896 - DNA, 20 bp, synthetic construct
  source 1..20: mol_type = other DNA
ggacgtaggtacagcatttc

SEQ ID NO: 294897 - DNA, 20 bp, synthetic construct
  source 1..20: mol_type = other DNA
gggacgtaggtacagcattt

SEQ ID NO: 294898 - DNA, 20 bp, synthetic construct
  source 1..20: mol_type = other DNA
cgggacgtaggtacagcatt

SEQ ID NO: 294899 - DNA, 20 bp, synthetic construct
  source 1..20: mol_type = other DNA
ccgggacgtaggtacagcat

SEQ ID NO: 294900 - DNA, 20 bp, synthetic construct
  source 1..20: mol_type = other DNA
cccgggacgtaggtacagca

SEQ ID NO: 294901 - DNA, 20 bp, synthetic construct
  source 1..20: mol_type = other DNA
ccccgggacgtaggtacagc

SEQ ID NO: 294902 - DNA, 20 bp, synthetic construct
  source 1..20: mol_type = other DNA
accccgggacgtaggtacag

SEQ ID NO: 294903 - DNA, 20 bp, synthetic construct
  source 1..20: mol_type = other DNA
caccccgggacgtaggtaca

SEQ ID NO: 294904 - DNA, 20 bp, synthetic construct
  source 1..20: mol_type = other DNA
ccaccccgggacgtaggtac

SEQ ID NO: 294905 - DNA, 20 bp, synthetic construct
  source 1..20: mol_type = other DNA
accaccccgggacgtaggta

SEQ ID NO: 294906 - DNA, 20 bp, synthetic construct
  source 1..20: mol_type = other DNA
aaccaccccgggacgtaggt

SEQ ID NO: 294907 - DNA, 20 bp, synthetic construct
  source 1..20: mol_type = other DNA
caaccaccccgggacgtagg

SEQ ID NO: 294908 - DNA, 20 bp, synthetic construct
  source 1..20: mol_type = other DNA
acaaccaccccgggacgtag

SEQ ID NO: 294909 - DNA, 20 bp, synthetic construct
  source 1..20: mol_type = other DNA
cacaaccaccccgggacgta

SEQ ID NO: 294910 - DNA, 20 bp, synthetic construct
  source 1..20: mol_type = other DNA
tcacaaccaccccgggacgt

SEQ ID NO: 294911 - DNA, 20 bp, synthetic construct
  source 1..20: mol_type = other DNA
ctcacaaccaccccgggacg

SEQ ID NO: 294912 - DNA, 20 bp, synthetic construct
  source 1..20: mol_type = other DNA
tctcacaaccaccccgggac

SEQ ID NO: 294913 - DNA, 20 bp, synthetic construct
  source 1..20: mol_type = other DNA
gtctcacaaccaccccggga

SEQ ID NO: 294914 - DNA, 20 bp, synthetic construct
  source 1..20: mol_type = other DNA
ggtctcacaaccaccccggg

SEQ ID NO: 294915 - DNA, 20 bp, synthetic construct
  source 1..20: mol_type = other DNA
gggtctcacaaccaccccgg

SEQ ID NO: 294916 - DNA, 20 bp, synthetic construct
  source 1..20: mol_type = other DNA
tgggtctcacaaccaccccg

SEQ ID NO: 294917 - DNA, 20 bp, synthetic construct
  source 1..20: mol_type = other DNA
ttgggtctcacaaccacccc

SEQ ID NO: 294918 - DNA, 20 bp, synthetic construct
  source 1..20: mol_type = other DNA
tttgggtctcacaaccaccc

SEQ ID NO: 294919 - DNA, 20 bp, synthetic construct
  source 1..20: mol_type = other DNA
ttttgggtctcacaaccacc

SEQ ID NO: 294920 - DNA, 20 bp, synthetic construct
  source 1..20: mol_type = other DNA
tttttgggtctcacaaccac

SEQ ID NO: 294921 - DNA, 20 bp, synthetic construct
  source 1..20: mol_type = other DNA
ttttttgggtctcacaacca

SEQ ID NO: 294922 - DNA, 20 bp, synthetic construct
  source 1..20: mol_type = other DNA
cttttttgggtctcacaacc

SEQ ID NO: 294923 - DNA, 20 bp, synthetic construct
  source 1..20: mol_type = other DNA
tcttttttgggtctcacaac

SEQ ID NO: 294924 - DNA, 20 bp, synthetic construct
  source 1..20: mol_type = other DNA
gtcttttttgggtctcacaa

SEQ ID NO: 294925 - DNA, 20 bp, synthetic construct
  source 1..20: mol_type = other DNA
tgtcttttttgggtctcaca

SEQ ID NO: 294926 - DNA, 20 bp, synthetic construct
  source 1..20: mol_type = other DNA
ttgtcttttttgggtctcac

SEQ ID NO: 294927 - DNA, 20 bp, synthetic construct
  source 1..20: mol_type = other DNA
attgtcttttttgggtctca

SEQ ID NO: 294928 - DNA, 20 bp, synthetic construct
  source 1..20: mol_type = other DNA
cattgtcttttttgggtctc

SEQ ID NO: 294929 - DNA, 20 bp, synthetic construct
  source 1..20: mol_type = other DNA
acattgtcttttttgggtct

SEQ ID NO: 294930 - DNA, 20 bp, synthetic construct
  source 1..20: mol_type = other DNA
aacattgtcttttttgggtc

SEQ ID NO: 294931 - DNA, 20 bp, synthetic construct
  source 1..20: mol_type = other DNA
gaacattgtcttttttgggt

SEQ ID NO: 294932 - DNA, 20 bp, synthetic construct
  source 1..20: mol_type = other DNA
agaacattgtcttttttggg

SEQ ID NO: 294933 - DNA, 20 bp, synthetic construct
  source 1..20: mol_type = other DNA
cagaacattgtcttttttgg

SEQ ID NO: 294934 - DNA, 20 bp, synthetic construct
  source 1..20: mol_type = other DNA
ccagaacattgtcttttttg

SEQ ID NO: 294935 - DNA, 20 bp, synthetic construct
  source 1..20: mol_type = other DNA
tccagaacattgtctttttt

SEQ ID NO: 294936 - DNA, 20 bp, synthetic construct
  source 1..20: mol_type = other DNA
ttccagaacattgtcttttt

SEQ ID NO: 294937 - DNA, 20 bp, synthetic construct
  source 1..20: mol_type = other DNA
cttccagaacattgtctttt

SEQ ID NO: 294938 - DNA, 20 bp, synthetic construct
  source 1..20: mol_type = other DNA
ccttccagaacattgtcttt

SEQ ID NO: 294939 - DNA, 20 bp, synthetic construct
  source 1..20: mol_type = other DNA
accttccagaacattgtctt

SEQ ID NO: 294940 - DNA, 20 bp, synthetic construct
  source 1..20: mol_type = other DNA
aaccttccagaacattgtct

SEQ ID NO: 294941 - DNA, 20 bp, synthetic construct
  source 1..20: mol_type = other DNA
gaaccttccagaacattgtc

SEQ ID NO: 294942 - DNA, 20 bp, synthetic construct
  source 1..20: mol_type = other DNA
ggaaccttccagaacattgt

SEQ ID NO: 294943 - DNA, 20 bp, synthetic construct
  source 1..20: mol_type = other DNA
aggaaccttccagaacattg

SEQ ID NO: 294944 - DNA, 20 bp, synthetic construct
  source 1..20: mol_type = other DNA
caggaaccttccagaacatt

SEQ ID NO: 294945 - DNA, 20 bp, synthetic construct
  source 1..20: mol_type = other DNA
ccaggaaccttccagaacat

SEQ ID NO: 294946 - DNA, 20 bp, synthetic construct
  source 1..20: mol_type = other DNA
accaggaaccttccagaaca

SEQ ID NO: 294947 - DNA, 20 bp, synthetic construct
  source 1..20: mol_type = other DNA
caccaggaaccttccagaac

SEQ ID NO: 294948 - DNA, 20 bp, synthetic construct
  source 1..20: mol_type = other DNA
gcaccaggaaccttccagaa

SEQ ID NO: 294949 - DNA, 20 bp, synthetic construct
  source 1..20: mol_type = other DNA
cgcaccaggaaccttccaga

SEQ ID NO: 294950 - DNA, 20 bp, synthetic construct
  source 1..20: mol_type = other DNA
acgcaccaggaaccttccag

SEQ ID NO: 294951 - DNA, 20 bp, synthetic construct
  source 1..20: mol_type = other DNA
aacgcaccaggaaccttcca

SEQ ID NO: 294952 - DNA, 20 bp, synthetic construct
  source 1..20: mol_type = other DNA
caacgcaccaggaaccttcc

SEQ ID NO: 294953 - DNA, 20 bp, synthetic construct
  source 1..20: mol_type = other DNA
gcaacgcaccaggaaccttc

SEQ ID NO: 294954 - DNA, 20 bp, synthetic construct
  source 1..20: mol_type = other DNA
tgcaacgcaccaggaacctt

SEQ ID NO: 294955 - DNA, 20 bp, synthetic construct
  source 1..20: mol_type = other DNA
ctgcaacgcaccaggaacct

SEQ ID NO: 294956 - DNA, 20 bp, synthetic construct
  source 1..20: mol_type = other DNA
actgcaacgcaccaggaacc

SEQ ID NO: 294957 - DNA, 20 bp, synthetic construct
  source 1..20: mol_type = other DNA
gactgcaacgcaccaggaac

SEQ ID NO: 294958 - DNA, 20 bp, synthetic construct
  source 1..20: mol_type = other DNA
ggactgcaacgcaccaggaa

SEQ ID NO: 294959 - DNA, 20 bp, synthetic construct
  source 1..20: mol_type = other DNA
aggactgcaacgcaccagga

SEQ ID NO: 294960 - DNA, 20 bp, synthetic construct
  source 1..20: mol_type = other DNA
gaggactgcaacgcaccagg

SEQ ID NO: 294961 - DNA, 20 bp, synthetic construct
  source 1..20: mol_type = other DNA
agaggactgcaacgcaccag

SEQ ID NO: 294962 - DNA, 20 bp, synthetic construct
  source 1..20: mol_type = other DNA
tagaggactgcaacgcacca

SEQ ID NO: 294963 - DNA, 20 bp, synthetic construct
  source 1..20: mol_type = other DNA
ttagaggactgcaacgcacc

SEQ ID NO: 294964 - DNA, 20 bp, synthetic construct
  source 1..20: mol_type = other DNA
cttagaggactgcaacgcac

SEQ ID NO: 294965 - DNA, 20 bp, synthetic construct
  source 1..20: mol_type = other DNA
tcttagaggactgcaacgca

SEQ ID NO: 294966 - DNA, 20 bp, synthetic construct
  source 1..20: mol_type = other DNA
ttcttagaggactgcaacgc

SEQ ID NO: 294967 - DNA, 20 bp, synthetic construct
  source 1..20: mol_type = other DNA
gttcttagaggactgcaacg

SEQ ID NO: 294968 - DNA, 20 bp, synthetic construct
  source 1..20: mol_type = other DNA
ggttcttagaggactgcaac

SEQ ID NO: 294969 - DNA, 20 bp, synthetic construct
  source 1..20: mol_type = other DNA
aggttcttagaggactgcaa

SEQ ID NO: 294970 - DNA, 20 bp, synthetic construct
  source 1..20: mol_type = other DNA
caggttcttagaggactgca

SEQ ID NO: 294971 - DNA, 20 bp, synthetic construct
  source 1..20: mol_type = other DNA
tcaggttcttagaggactgc

SEQ ID NO: 294972 - DNA, 20 bp, synthetic construct
  source 1..20: mol_type = other DNA
ctcaggttcttagaggactg

SEQ ID NO: 294973 - DNA, 20 bp, synthetic construct
  source 1..20: mol_type = other DNA
actcaggttcttagaggact

SEQ ID NO: 294974 - DNA, 20 bp, synthetic construct
  source 1..20: mol_type = other DNA
aactcaggttcttagaggac

SEQ ID NO: 294975 - DNA, 20 bp, synthetic construct
  source 1..20: mol_type = other DNA
taactcaggttcttagagga

SEQ ID NO: 294976 - DNA, 20 bp, synthetic construct
  source 1..20: mol_type = other DNA
ctaactcaggttcttagagg

SEQ ID NO: 294977 - DNA, 20 bp, synthetic construct
  source 1..20: mol_type = other DNA
tctaactcaggttcttagag

SEQ ID NO: 294978 - DNA, 20 bp, synthetic construct
  source 1..20: mol_type = other DNA
ctctaactcaggttcttaga

SEQ ID NO: 294979 - DNA, 20 bp, synthetic construct
  source 1..20: mol_type = other DNA
gctctaactcaggttcttag

SEQ ID NO: 294980 - DNA, 20 bp, synthetic construct
  source 1..20: mol_type = other DNA
ggctctaactcaggttctta

SEQ ID NO: 294981 - DNA, 20 bp, synthetic construct
  source 1..20: mol_type = other DNA
tggctctaactcaggttctt

SEQ ID NO: 294982 - DNA, 20 bp, synthetic construct
  source 1..20: mol_type = other DNA
gtggctctaactcaggttct

SEQ ID NO: 294983 - DNA, 20 bp, synthetic construct
  source 1..20: mol_type = other DNA
cgtggctctaactcaggttc

SEQ ID NO: 294984 - DNA, 20 bp, synthetic construct
  source 1..20: mol_type = other DNA
gcgtggctctaactcaggtt

SEQ ID NO: 294985 - DNA, 20 bp, synthetic construct
  source 1..20: mol_type = other DNA
agcgtggctctaactcaggt

SEQ ID NO: 294986 - DNA, 20 bp, synthetic construct
  source 1..20: mol_type = other DNA
cagcgtggctctaactcagg

SEQ ID NO: 294987 - DNA, 20 bp, synthetic construct
  source 1..20: mol_type = other DNA
tcagcgtggctctaactcag

SEQ ID NO: 294988 - DNA, 20 bp, synthetic construct
  source 1..20: mol_type = other DNA
ctcagcgtggctctaactca

SEQ ID NO: 294989 - DNA, 20 bp, synthetic construct
  source 1..20: mol_type = other DNA
actcagcgtggctctaactc

SEQ ID NO: 294990 - DNA, 20 bp, synthetic construct
  source 1..20: mol_type = other DNA
gactcagcgtggctctaact

SEQ ID NO: 294991 - DNA, 20 bp, synthetic construct
  source 1..20: mol_type = other DNA
agactcagcgtggctctaac

SEQ ID NO: 294992 - DNA, 20 bp, synthetic construct
  source 1..20: mol_type = other DNA
gagactcagcgtggctctaa

SEQ ID NO: 294993 - DNA, 20 bp, synthetic construct
  source 1..20: mol_type = other DNA
tgagactcagcgtggctcta

SEQ ID NO: 294994 - DNA, 20 bp, synthetic construct
  source 1..20: mol_type = other DNA
ctgagactcagcgtggctct

SEQ ID NO: 294995 - DNA, 20 bp, synthetic construct
  source 1..20: mol_type = other DNA
gctgagactcagcgtggctc

SEQ ID NO: 294996 - DNA, 20 bp, synthetic construct
  source 1..20: mol_type = other DNA
agctgagactcagcgtggct

SEQ ID NO: 294997 - DNA, 20 bp, synthetic construct
  source 1..20: mol_type = other DNA
aagctgagactcagcgtggc

SEQ ID NO: 294998 - DNA, 20 bp, synthetic construct
  source 1..20: mol_type = other DNA
gaagctgagactcagcgtgg

SEQ ID NO: 294999 - DNA, 20 bp, synthetic construct
  source 1..20: mol_type = other DNA
agaagctgagactcagcgtg

SEQ ID NO: 295000 - DNA, 20 bp, synthetic construct
  source 1..20: mol_type = other DNA
aagaagctgagactcagcgt

SEQ ID NO: 295001 - DNA, 20 bp, synthetic construct
  source 1..20: mol_type = other DNA
caagaagctgagactcagcg

SEQ ID NO: 295002 - DNA, 20 bp, synthetic construct
  source 1..20: mol_type = other DNA
ccaagaagctgagactcagc

SEQ ID NO: 295003 - DNA, 20 bp, synthetic construct
  source 1..20: mol_type = other DNA
gccaagaagctgagactcag

SEQ ID NO: 295004 - DNA, 20 bp, synthetic construct
  source 1..20: mol_type = other DNA
agccaagaagctgagactca

SEQ ID NO: 295005 - DNA, 20 bp, synthetic construct
  source 1..20: mol_type = other DNA
gagccaagaagctgagactc

SEQ ID NO: 295006 - DNA, 20 bp, synthetic construct
  source 1..20: mol_type = other DNA
ggagccaagaagctgagact

SEQ ID NO: 295007 - DNA, 20 bp, synthetic construct
  source 1..20: mol_type = other DNA
aggagccaagaagctgagac

SEQ ID NO: 295008 - DNA, 20 bp, synthetic construct
  source 1..20: mol_type = other DNA
aaggagccaagaagctgaga

SEQ ID NO: 295009 - DNA, 20 bp, synthetic construct
  source 1..20: mol_type = other DNA
gaaggagccaagaagctgag

SEQ ID NO: 295010 - DNA, 20 bp, synthetic construct
  source 1..20: mol_type = other DNA
agaaggagccaagaagctga

SEQ ID NO: 295011 - DNA, 20 bp, synthetic construct
  source 1..20: mol_type = other DNA
cagaaggagccaagaagctg

SEQ ID NO: 295012 - DNA, 20 bp, synthetic construct
  source 1..20: mol_type = other DNA
acagaaggagccaagaagct

SEQ ID NO: 295013 - DNA, 20 bp, synthetic construct
  source 1..20: mol_type = other DNA
aacagaaggagccaagaagc

SEQ ID NO: 295014 - DNA, 20 bp, synthetic construct
  source 1..20: mol_type = other DNA
aaacagaaggagccaagaag

SEQ ID NO: 295015 - DNA, 20 bp, synthetic construct
  source 1..20: mol_type = other DNA
gaaacagaaggagccaagaa

SEQ ID NO: 295016 - DNA, 20 bp, synthetic construct
  source 1..20: mol_type = other DNA
tgaaacagaaggagccaaga

SEQ ID NO: 295017 - DNA, 20 bp, synthetic construct
  source 1..20: mol_type = other DNA
ttgaaacagaaggagccaag

SEQ ID NO: 295018 - DNA, 20 bp, synthetic construct
  source 1..20: mol_type = other DNA
tttgaaacagaaggagccaa

SEQ ID NO: 295019 - DNA, 20 bp, synthetic construct
  source 1..20: mol_type = other DNA
gtttgaaacagaaggagcca

SEQ ID NO: 295020 - DNA, 20 bp, synthetic construct
  source 1..20: mol_type = other DNA
agtttgaaacagaaggagcc

SEQ ID NO: 295021 - DNA, 20 bp, synthetic construct
  source 1..20: mol_type = other DNA
gagtttgaaacagaaggagc

SEQ ID NO: 295022 - DNA, 20 bp, synthetic construct
  source 1..20: mol_type = other DNA
cgagtttgaaacagaaggag

SEQ ID NO: 295023 - DNA, 20 bp, synthetic construct
  source 1..20: mol_type = other DNA
acgagtttgaaacagaagga

SEQ ID NO: 295024 - DNA, 20 bp, synthetic construct
  source 1..20: mol_type = other DNA
gacgagtttgaaacagaagg

SEQ ID NO: 295025 - DNA, 20 bp, synthetic construct
  source 1..20: mol_type = other DNA
ggacgagtttgaaacagaag

SEQ ID NO: 295026 - DNA, 20 bp, synthetic construct
  source 1..20: mol_type = other DNA
tggacgagtttgaaacagaa

SEQ ID NO: 295027 - DNA, 20 bp, synthetic construct
  source 1..20: mol_type = other DNA
atggacgagtttgaaacaga

SEQ ID NO: 295028 - DNA, 20 bp, synthetic construct
  source 1..20: mol_type = other DNA
catggacgagtttgaaacag

SEQ ID NO: 295029 - DNA, 20 bp, synthetic construct
  source 1..20: mol_type = other DNA
acatggacgagtttgaaaca

SEQ ID NO: 295030 - DNA, 20 bp, synthetic construct
  source 1..20: mol_type = other DNA
cacatggacgagtttgaaac

SEQ ID NO: 295031 - DNA, 20 bp, synthetic construct
  source 1..20: mol_type = other DNA
tcacatggacgagtttgaaa

SEQ ID NO: 295032 - DNA, 20 bp, synthetic construct
  source 1..20: mol_type = other DNA
atcacatggacgagtttgaa

SEQ ID NO: 295033 - DNA, 20 bp, synthetic construct
  source 1..20: mol_type = other DNA
tatcacatggacgagtttga

SEQ ID NO: 295034 - DNA, 20 bp, synthetic construct
  source 1..20: mol_type = other DNA
ctatcacatggacgagtttg

SEQ ID NO: 295035 - DNA, 20 bp, synthetic construct
  source 1..20: mol_type = other DNA
gctatcacatggacgagttt

SEQ ID NO: 295036 - DNA, 20 bp, synthetic construct
  source 1..20: mol_type = other DNA
agctatcacatggacgagtt

SEQ ID NO: 295037 - DNA, 20 bp, synthetic construct
  source 1..20: mol_type = other DNA
gagctatcacatggacgagt

SEQ ID NO: 295038 - DNA, 20 bp, synthetic construct
  source 1..20: mol_type = other DNA
tgagctatcacatggacgag

SEQ ID NO: 295039 - DNA, 20 bp, synthetic construct
  source 1..20: mol_type = other DNA
ctgagctatcacatggacga

SEQ ID NO: 295040 - DNA, 20 bp, synthetic construct
  source 1..20: mol_type = other DNA
cctgagctatcacatggacg

SEQ ID NO: 295041 - DNA, 20 bp, synthetic construct
  source 1..20: mol_type = other DNA
tcctgagctatcacatggac

SEQ ID NO: 295042 - DNA, 20 bp, synthetic construct
  source 1..20: mol_type = other DNA
ttcctgagctatcacatgga

SEQ ID NO: 295043 - DNA, 20 bp, synthetic construct
  source 1..20: mol_type = other DNA
cttcctgagctatcacatgg

SEQ ID NO: 295044 - DNA, 20 bp, synthetic construct
  source 1..20: mol_type = other DNA
ccttcctgagctatcacatg

SEQ ID NO: 295045 - DNA, 20 bp, synthetic construct
  source 1..20: mol_type = other DNA
cccttcctgagctatcacat

SEQ ID NO: 295046 - DNA, 20 bp, synthetic construct
  source 1..20: mol_type = other DNA
acccttcctgagctatcaca

SEQ ID NO: 295047 - DNA, 20 bp, synthetic construct
  source 1..20: mol_type = other DNA
tacccttcctgagctatcac

SEQ ID NO: 295048 - DNA, 20 bp, synthetic construct
  source 1..20: mol_type = other DNA
ctacccttcctgagctatca

SEQ ID NO: 295049 - DNA, 20 bp, synthetic construct
  source 1..20: mol_type = other DNA
cctacccttcctgagctatc

SEQ ID NO: 295050 - DNA, 20 bp, synthetic construct
  source 1..20: mol_type = other DNA
gcctacccttcctgagctat

SEQ ID NO: 295051 - DNA, 20 bp, synthetic construct
  source 1..20: mol_type = other DNA
tgcctacccttcctgagcta

SEQ ID NO: 295052 - DNA, 20 bp, synthetic construct
  source 1..20: mol_type = other DNA
ctgcctacccttcctgagct

SEQ ID NO: 295053 - DNA, 20 bp, synthetic construct
  source 1..20: mol_type = other DNA
cctgcctacccttcctgagc

SEQ ID NO: 295054 - DNA, 20 bp, synthetic construct
  source 1..20: mol_type = other DNA
ccctgcctacccttcctgag

SEQ ID NO: 295055 - DNA, 20 bp, synthetic construct
  source 1..20: mol_type = other DNA
gccctgcctacccttcctga

SEQ ID NO: 295056 - DNA, 20 bp, synthetic construct
  source 1..20: mol_type = other DNA
ggccctgcctacccttcctg

SEQ ID NO: 295057 - DNA, 20 bp, synthetic construct
  source 1..20: mol_type = other DNA
gggccctgcctacccttcct

SEQ ID NO: 295058 - DNA, 20 bp, synthetic construct
  source 1..20: mol_type = other DNA
agggccctgcctacccttcc

SEQ ID NO: 295059 - DNA, 20 bp, synthetic construct
  source 1..20: mol_type = other DNA
cagggccctgcctacccttc

SEQ ID NO: 295060 - DNA, 20 bp, synthetic construct
  source 1..20: mol_type = other DNA
gcagggccctgcctaccctt

SEQ ID NO: 295061 - DNA, 20 bp, synthetic construct
  source 1..20: mol_type = other DNA
ggcagggccctgcctaccct

SEQ ID NO: 295062 - DNA, 20 bp, synthetic construct
  source 1..20: mol_type = other DNA
gggcagggccctgcctaccc

SEQ ID NO: 295063 - DNA, 20 bp, synthetic construct
  source 1..20: mol_type = other DNA
ggggcagggccctgcctacc

SEQ ID NO: 295064 - DNA, 20 bp, synthetic construct
  source 1..20: mol_type = other DNA
gggggcagggccctgcctac

SEQ ID NO: 295065 - DNA, 20 bp, synthetic construct
  source 1..20: mol_type = other DNA
agggggcagggccctgccta

SEQ ID NO: 295066 - DNA, 20 bp, synthetic construct
  source 1..20: mol_type = other DNA
tagggggcagggccctgcct

SEQ ID NO: 295067 - DNA, 20 bp, synthetic construct
  source 1..20: mol_type = other DNA
gtagggggcagggccctgcc

SEQ ID NO: 295068 - DNA, 20 bp, synthetic construct
  source 1..20: mol_type = other DNA
agtagggggcagggccctgc

SEQ ID NO: 295069 - DNA, 20 bp, synthetic construct
  source 1..20: mol_type = other DNA
gagtagggggcagggccctg

SEQ ID NO: 295070 - DNA, 20 bp, synthetic construct
  source 1..20: mol_type = other DNA
tgagtagggggcagggccct

SEQ ID NO: 295071 - DNA, 20 bp, synthetic construct
  source 1..20: mol_type = other DNA
ctgagtagggggcagggccc

SEQ ID NO: 295072 - DNA, 20 bp, synthetic construct
  source 1..20: mol_type = other DNA
tctgagtagggggcagggcc

SEQ ID NO: 295073 - DNA, 20 bp, synthetic construct
  source 1..20: mol_type = other DNA
ttctgagtagggggcagggc

SEQ ID NO: 295074 - DNA, 20 bp, synthetic construct
  source 1..20: mol_type = other DNA
tttctgagtagggggcaggg

SEQ ID NO: 295075 - DNA, 20 bp, synthetic construct
  source 1..20: mol_type = other DNA
ttttctgagtagggggcagg

SEQ ID NO: 295076 - DNA, 20 bp, synthetic construct
  source 1..20: mol_type = other DNA
gttttctgagtagggggcag

SEQ ID NO: 295077 - DNA, 20 bp, synthetic construct
  source 1..20: mol_type = other DNA
tgttttctgagtagggggca

SEQ ID NO: 295078 - DNA, 20 bp, synthetic construct
  source 1..20: mol_type = other DNA
gtgttttctgagtagggggc

SEQ ID NO: 295079 - DNA, 20 bp, synthetic construct
  source 1..20: mol_type = other DNA
ggtgttttctgagtaggggg

SEQ ID NO: 295080 - DNA, 20 bp, synthetic construct
  source 1..20: mol_type = other DNA
tggtgttttctgagtagggg

SEQ ID NO: 295081 - DNA, 20 bp, synthetic construct
  source 1..20: mol_type = other DNA
atggtgttttctgagtaggg

SEQ ID NO: 295082 - DNA, 20 bp, synthetic construct
  source 1..20: mol_type = other DNA
gatggtgttttctgagtagg

SEQ ID NO: 295083 - DNA, 20 bp, synthetic construct
  source 1..20: mol_type = other DNA
ggatggtgttttctgagtag

SEQ ID NO: 295084 - DNA, 20 bp, synthetic construct
  source 1..20: mol_type = other DNA
aggatggtgttttctgagta

SEQ ID NO: 295085 - DNA, 20 bp, synthetic construct
  source 1..20: mol_type = other DNA
caggatggtgttttctgagt

SEQ ID NO: 295086 - DNA, 20 bp, synthetic construct
  source 1..20: mol_type = other DNA
ccaggatggtgttttctgag

SEQ ID NO: 295087 - DNA, 20 bp, synthetic construct
  source 1..20: mol_type = other DNA
accaggatggtgttttctga

SEQ ID NO: 295088 - DNA, 20 bp, synthetic construct
  source 1..20: mol_type = other DNA
gaccaggatggtgttttctg

SEQ ID NO: 295089 - DNA, 20 bp, synthetic construct
  source 1..20: mol_type = other DNA
ggaccaggatggtgttttct

SEQ ID NO: 295090 - DNA, 20 bp, synthetic construct
  source 1..20: mol_type = other DNA
aggaccaggatggtgttttc

SEQ ID NO: 295091 - DNA, 20 bp, synthetic construct
  source 1..20: mol_type = other DNA
caggaccaggatggtgtttt

SEQ ID NO: 295092 - DNA, 20 bp, synthetic construct
  source 1..20: mol_type = other DNA
ccaggaccaggatggtgttt

SEQ ID NO: 295093 - DNA, 20 bp, synthetic construct
  source 1..20: mol_type = other DNA
cccaggaccaggatggtgtt

SEQ ID NO: 295094 - DNA, 20 bp, synthetic construct
  source 1..20: mol_type = other DNA
ccccaggaccaggatggtgt

SEQ ID NO: 295095 - DNA, 20 bp, synthetic construct
  source 1..20: mol_type = other DNA
tccccaggaccaggatggtg

SEQ ID NO: 295096 - DNA, 20 bp, synthetic construct
  source 1..20: mol_type = other DNA
atccccaggaccaggatggt

SEQ ID NO: 295097 - DNA, 20 bp, synthetic construct
  source 1..20: mol_type = other DNA
gatccccaggaccaggatgg

SEQ ID NO: 295098 - DNA, 20 bp, synthetic construct
  source 1..20: mol_type = other DNA
ggatccccaggaccaggatg

SEQ ID NO: 295099 - DNA, 20 bp, synthetic construct
  source 1..20: mol_type = other DNA
gggatccccaggaccaggat

SEQ ID NO: 295100 - DNA, 20 bp, synthetic construct
  source 1..20: mol_type = other DNA
ggggatccccaggaccagga

SEQ ID NO: 295101 - DNA, 20 bp, synthetic construct
  source 1..20: mol_type = other DNA
cggggatccccaggaccagg

SEQ ID NO: 295102 - DNA, 20 bp, synthetic construct
  source 1..20: mol_type = other DNA
gcggggatccccaggaccag

SEQ ID NO: 295103 - DNA, 20 bp, synthetic construct
  source 1..20: mol_type = other DNA
tgcggggatccccaggacca

SEQ ID NO: 295104 - DNA, 20 bp, synthetic construct
  source 1..20: mol_type = other DNA
ctgcggggatccccaggacc

SEQ ID NO: 295105 - DNA, 20 bp, synthetic construct
  source 1..20: mol_type = other DNA
gctgcggggatccccaggac

SEQ ID NO: 295106 - DNA, 20 bp, synthetic construct
  source 1..20: mol_type = other DNA
tgctgcggggatccccagga

SEQ ID NO: 295107 - DNA, 20 bp, synthetic construct
  source 1..20: mol_type = other DNA
atgctgcggggatccccagg

SEQ ID NO: 295108 - DNA, 20 bp, synthetic construct
  source 1..20: mol_type = other DNA
aatgctgcggggatccccag

SEQ ID NO: 295109 - DNA, 20 bp, synthetic construct
  source 1..20: mol_type = other DNA
taatgctgcggggatcccca

SEQ ID NO: 295110 - DNA, 20 bp, synthetic construct
  source 1..20: mol_type = other DNA
ctaatgctgcggggatcccc

SEQ ID NO: 295111 - DNA, 20 bp, synthetic construct
  source 1..20: mol_type = other DNA
actaatgctgcggggatccc

SEQ ID NO: 295112 - DNA, 20 bp, synthetic construct
  source 1..20: mol_type = other DNA
gactaatgctgcggggatcc

SEQ ID NO: 295113 - DNA, 20 bp, synthetic construct
  source 1..20: mol_type = other DNA
ggactaatgctgcggggatc

SEQ ID NO: 295114 - DNA, 20 bp, synthetic construct
  source 1..20: mol_type = other DNA
gggactaatgctgcggggat

SEQ ID NO: 295115 - DNA, 20 bp, synthetic construct
  source 1..20: mol_type = other DNA
ggggactaatgctgcgggga

SEQ ID NO: 295116 - DNA, 20 bp, synthetic construct
  source 1..20: mol_type = other DNA
aggggactaatgctgcgggg

SEQ ID NO: 295117 - DNA, 20 bp, synthetic construct
  source 1..20: mol_type = other DNA
caggggactaatgctgcggg

SEQ ID NO: 295118 - DNA, 20 bp, synthetic construct
  source 1..20: mol_type = other DNA
acaggggactaatgctgcgg

SEQ ID NO: 295119 - DNA, 20 bp, synthetic construct
  source 1..20: mol_type = other DNA
aacaggggactaatgctgcg

SEQ ID NO: 295120 - DNA, 20 bp, synthetic construct
  source 1..20: mol_type = other DNA
aaacaggggactaatgctgc

SEQ ID NO: 295121 - DNA, 20 bp, synthetic construct
  source 1..20: mol_type = other DNA
aaaacaggggactaatgctg

SEQ ID NO: 295122 - DNA, 20 bp, synthetic construct
  source 1..20: mol_type = other DNA
gaaaacaggggactaatgct

SEQ ID NO: 295123 - DNA, 20 bp, synthetic construct
  source 1..20: mol_type = other DNA
ggaaaacaggggactaatgc

SEQ ID NO: 295124 - DNA, 20 bp, synthetic construct
  source 1..20: mol_type = other DNA
gggaaaacaggggactaatg

SEQ ID NO: 295125 - DNA, 20 bp, synthetic construct
  source 1..20: mol_type = other DNA
tgggaaaacaggggactaat

SEQ ID NO: 295126 - DNA, 20 bp, synthetic construct
  source 1..20: mol_type = other DNA
ctgggaaaacaggggactaa

SEQ ID NO: 295127 - DNA, 20 bp, synthetic construct
  source 1..20: mol_type = other DNA
actgggaaaacaggggacta

SEQ ID NO: 295128 - DNA, 20 bp, synthetic construct
  source 1..20: mol_type = other DNA
cactgggaaaacaggggact

SEQ ID NO: 295129 - DNA, 20 bp, synthetic construct
  source 1..20: mol_type = other DNA
acactgggaaaacaggggac

SEQ ID NO: 295130 - DNA, 20 bp, synthetic construct
  source 1..20: mol_type = other DNA
tacactgggaaaacagggga

SEQ ID NO: 295131 - DNA, 20 bp, synthetic construct
  source 1..20: mol_type = other DNA
atacactgggaaaacagggg

SEQ ID NO: 295132 - DNA, 20 bp, synthetic construct
  source 1..20: mol_type = other DNA
aatacactgggaaaacaggg

SEQ ID NO: 295133 - DNA, 20 bp, synthetic construct
  source 1..20: mol_type = other DNA
caatacactgggaaaacagg

SEQ ID NO: 295134 - DNA, 20 bp, synthetic construct
  source 1..20: mol_type = other DNA
tcaatacactgggaaaacag

SEQ ID NO: 295135 - DNA, 20 bp, synthetic construct
  source 1..20: mol_type = other DNA
ctcaatacactgggaaaaca

SEQ ID NO: 295136 - DNA, 20 bp, synthetic construct
  source 1..20: mol_type = other DNA
tctcaatacactgggaaaac

SEQ ID NO: 295137 - DNA, 20 bp, synthetic construct
  source 1..20: mol_type = other DNA
ttctcaatacactgggaaaa

SEQ ID NO: 295138 - DNA, 20 bp, synthetic construct
  source 1..20: mol_type = other DNA
tttctcaatacactgggaaa

SEQ ID NO: 295139 - DNA, 20 bp, synthetic construct
  source 1..20: mol_type = other DNA
ttttctcaatacactgggaa

SEQ ID NO: 295140 - DNA, 20 bp, synthetic construct
  source 1..20: mol_type = other DNA
tttttctcaatacactggga

SEQ ID NO: 295141 - DNA, 20 bp, synthetic construct
  source 1..20: mol_type = other DNA
atttttctcaatacactggg

SEQ ID NO: 295142 - DNA, 20 bp, synthetic construct
  source 1..20: mol_type = other DNA
aatttttctcaatacactgg

SEQ ID NO: 295143 - DNA, 20 bp, synthetic construct
  source 1..20: mol_type = other DNA
caatttttctcaatacactg

SEQ ID NO: 295144 - DNA, 20 bp, synthetic construct
  source 1..20: mol_type = other DNA
gcaatttttctcaatacact

SEQ ID NO: 295145 - DNA, 20 bp, synthetic construct
  source 1..20: mol_type = other DNA
agcaatttttctcaatacac

SEQ ID NO: 295146 - DNA, 20 bp, synthetic construct
  source 1..20: mol_type = other DNA
tagcaatttttctcaataca

SEQ ID NO: 295147 - DNA, 20 bp, synthetic construct
  source 1..20: mol_type = other DNA
ttagcaatttttctcaatac

SEQ ID NO: 295148 - DNA, 20 bp, synthetic construct
  source 1..20: mol_type = other DNA
gttagcaatttttctcaata

SEQ ID NO: 295149 - DNA, 20 bp, synthetic construct
  source 1..20: mol_type = other DNA
tgttagcaatttttctcaat

SEQ ID NO: 295150 - DNA, 20 bp, synthetic construct
  source 1..20: mol_type = other DNA
ttgttagcaatttttctcaa

SEQ ID NO: 295151 - DNA, 20 bp, synthetic construct
  source 1..20: mol_type = other DNA
cttgttagcaatttttctca

SEQ ID NO: 295152 - DNA, 20 bp, synthetic construct
  source 1..20: mol_type = other DNA
gcttgttagcaatttttctc

SEQ ID NO: 295153 - DNA, 20 bp, synthetic construct
  source 1..20: mol_type = other DNA
tgcttgttagcaatttttct

SEQ ID NO: 295154 - DNA, 20 bp, synthetic construct
  source 1..20: mol_type = other DNA
ctgcttgttagcaatttttc

SEQ ID NO: 295155 - DNA, 20 bp, synthetic construct
  source 1..20: mol_type = other DNA
actgcttgttagcaattttt

SEQ ID NO: 295156 - DNA, 20 bp, synthetic construct
  source 1..20: mol_type = other DNA
cactgcttgttagcaatttt

SEQ ID NO: 295157 - DNA, 20 bp, synthetic construct
  source 1..20: mol_type = other DNA
ccactgcttgttagcaattt

SEQ ID NO: 295158 - DNA, 20 bp, synthetic construct
  source 1..20: mol_type = other DNA
cccactgcttgttagcaatt

SEQ ID NO: 295159 - DNA, 20 bp, synthetic construct
  source 1..20: mol_type = other DNA
ccccactgcttgttagcaat

SEQ ID NO: 295160 - DNA, 20 bp, synthetic construct
  source 1..20: mol_type = other DNA
gccccactgcttgttagcaa

SEQ ID NO: 295161 - DNA, 20 bp, synthetic construct
  source 1..20: mol_type = other DNA
tgccccactgcttgttagca

SEQ ID NO: 295162 - DNA, 20 bp, synthetic construct
  source 1..20: mol_type = other DNA
gtgccccactgcttgttagc

SEQ ID NO: 295163 - DNA, 20 bp, synthetic construct
  source 1..20: mol_type = other DNA
tgtgccccactgcttgttag

SEQ ID NO: 295164 - DNA, 20 bp, synthetic construct
  source 1..20: mol_type = other DNA
gtgtgccccactgcttgtta

SEQ ID NO: 295165 - DNA, 20 bp, synthetic construct
  source 1..20: mol_type = other DNA
ggtgtgccccactgcttgtt

SEQ ID NO: 295166 - DNA, 20 bp, synthetic construct
  source 1..20: mol_type = other DNA
tggtgtgccccactgcttgt

SEQ ID NO: 295167 - DNA, 20 bp, synthetic construct
  source 1..20: mol_type = other DNA
gtggtgtgccccactgcttg

SEQ ID NO: 295168 - DNA, 20 bp, synthetic construct
  source 1..20: mol_type = other DNA
ggtggtgtgccccactgctt

SEQ ID NO: 295169 - DNA, 20 bp, synthetic construct
  source 1..20: mol_type = other DNA
tggtggtgtgccccactgct

SEQ ID NO: 295170 - DNA, 20 bp, synthetic construct
  source 1..20: mol_type = other DNA
ctggtggtgtgccccactgc

SEQ ID NO: 295171 - DNA, 20 bp, synthetic construct
  source 1..20: mol_type = other DNA
gctggtggtgtgccccactg

SEQ ID NO: 295172 - DNA, 20 bp, synthetic construct
  source 1..20: mol_type = other DNA
ggctggtggtgtgccccact

SEQ ID NO: 295173 - DNA, 20 bp, synthetic construct
  source 1..20: mol_type = other DNA
aggctggtggtgtgccccac

SEQ ID NO: 295174 - DNA, 20 bp, synthetic construct
  source 1..20: mol_type = other DNA
gaggctggtggtgtgcccca

SEQ ID NO: 295175 - DNA, 20 bp, synthetic construct
  source 1..20: mol_type = other DNA
ggaggctggtggtgtgcccc

SEQ ID NO: 295176 - DNA, 20 bp, synthetic construct
  source 1..20: mol_type = other DNA
aggaggctggtggtgtgccc

SEQ ID NO: 295177 - DNA, 20 bp, synthetic construct
  source 1..20: mol_type = other DNA
caggaggctggtggtgtgcc

SEQ ID NO: 295178 - DNA, 20 bp, synthetic construct
  source 1..20: mol_type = other DNA
ccaggaggctggtggtgtgc

SEQ ID NO: 295179 - DNA, 20 bp, synthetic construct
  source 1..20: mol_type = other DNA
cccaggaggctggtggtgtg

SEQ ID NO: 295180 - DNA, 20 bp, synthetic construct
  source 1..20: mol_type = other DNA
acccaggaggctggtggtgt

SEQ ID NO: 295181 - DNA, 20 bp, synthetic construct
  source 1..20: mol_type = other DNA
aacccaggaggctggtggtg

SEQ ID NO: 295182 - DNA, 20 bp, synthetic construct
  source 1..20: mol_type = other DNA
gaacccaggaggctggtggt

SEQ ID NO: 295183 - DNA, 20 bp, synthetic construct
  source 1..20: mol_type = other DNA
ggaacccaggaggctggtgg

SEQ ID NO: 295184 - DNA, 20 bp, synthetic construct
  source 1..20: mol_type = other DNA
aggaacccaggaggctggtg

SEQ ID NO: 295185 - DNA, 20 bp, synthetic construct
  source 1..20: mol_type = other DNA
aaggaacccaggaggctggt

SEQ ID NO: 295186 - DNA, 20 bp, synthetic construct
  source 1..20: mol_type = other DNA
aaaggaacccaggaggctgg

SEQ ID NO: 295187 - DNA, 20 bp, synthetic construct
  source 1..20: mol_type = other DNA
gaaaggaacccaggaggctg

SEQ ID NO: 295188 - DNA, 20 bp, synthetic construct
  source 1..20: mol_type = other DNA
tgaaaggaacccaggaggct

SEQ ID NO: 295189 - DNA, 20 bp, synthetic construct
  source 1..20: mol_type = other DNA
ctgaaaggaacccaggaggc

SEQ ID NO: 295190 - DNA, 20 bp, synthetic construct
  source 1..20: mol_type = other DNA
actgaaaggaacccaggagg

SEQ ID NO: 295191 - DNA, 20 bp, synthetic construct
  source 1..20: mol_type = other DNA
aactgaaaggaacccaggag

SEQ ID NO: 295192 - DNA, 20 bp, synthetic construct
  source 1..20: mol_type = other DNA
aaactgaaaggaacccagga

SEQ ID NO: 295193 - DNA, 20 bp, synthetic construct
  source 1..20: mol_type = other DNA
caaactgaaaggaacccagg

SEQ ID NO: 295194 - DNA, 20 bp, synthetic construct
  source 1..20: mol_type = other DNA
ccaaactgaaaggaacccag

SEQ ID NO: 295195 - DNA, 20 bp, synthetic construct
  source 1..20: mol_type = other DNA
cccaaactgaaaggaaccca

SEQ ID NO: 295196 - DNA, 20 bp, synthetic construct
  source 1..20: mol_type = other DNA
ccccaaactgaaaggaaccc

SEQ ID NO: 295197 - DNA, 20 bp, synthetic construct
  source 1..20: mol_type = other DNA
tccccaaactgaaaggaacc

SEQ ID NO: 295198 - DNA, 20 bp, synthetic construct
  source 1..20: mol_type = other DNA
atccccaaactgaaaggaac

SEQ ID NO: 295199 - DNA, 20 bp, synthetic construct
  source 1..20: mol_type = other DNA
aatccccaaactgaaaggaa

SEQ ID NO: 295200 - DNA, 20 bp, synthetic construct
  source 1..20: mol_type = other DNA
aaatccccaaactgaaagga

SEQ ID NO: 295201 - DNA, 20 bp, synthetic construct
  source 1..20: mol_type = other DNA
aaaatccccaaactgaaagg

SEQ ID NO: 295202 - DNA, 20 bp, synthetic construct
  source 1..20: mol_type = other DNA
aaaaatccccaaactgaaag

SEQ ID NO: 295203 - DNA, 20 bp, synthetic construct
  source 1..20: mol_type = other DNA
caaaaatccccaaactgaaa

SEQ ID NO: 295204 - DNA, 20 bp, synthetic construct
  source 1..20: mol_type = other DNA
ccaaaaatccccaaactgaa

SEQ ID NO: 295205 - DNA, 20 bp, synthetic construct
  source 1..20: mol_type = other DNA
tccaaaaatccccaaactga

SEQ ID NO: 295206 - DNA, 20 bp, synthetic construct
  source 1..20: mol_type = other DNA
gtccaaaaatccccaaactg

SEQ ID NO: 295207 - DNA, 20 bp, synthetic construct
  source 1..20: mol_type = other DNA
tgtccaaaaatccccaaact

SEQ ID NO: 295208 - DNA, 20 bp, synthetic construct
  source 1..20: mol_type = other DNA
atgtccaaaaatccccaaac

SEQ ID NO: 295209 - DNA, 20 bp, synthetic construct
  source 1..20: mol_type = other DNA
aatgtccaaaaatccccaaa

SEQ ID NO: 295210 - DNA, 20 bp, synthetic construct
  source 1..20: mol_type = other DNA
gaatgtccaaaaatccccaa

SEQ ID NO: 295211 - DNA, 20 bp, synthetic construct
  source 1..20: mol_type = other DNA
ggaatgtccaaaaatcccca

SEQ ID NO: 295212 - DNA, 20 bp, synthetic construct
  source 1..20: mol_type = other DNA
gggaatgtccaaaaatcccc

SEQ ID NO: 295213 - DNA, 20 bp, synthetic construct
  source 1..20: mol_type = other DNA
tgggaatgtccaaaaatccc

SEQ ID NO: 295214 - DNA, 20 bp, synthetic construct
  source 1..20: mol_type = other DNA
ctgggaatgtccaaaaatcc

SEQ ID NO: 295215 - DNA, 20 bp, synthetic construct
  source 1..20: mol_type = other DNA
cctgggaatgtccaaaaatc

SEQ ID NO: 295216 - DNA, 20 bp, synthetic construct
  source 1..20: mol_type = other DNA
tcctgggaatgtccaaaaat

SEQ ID NO: 295217 - DNA, 20 bp, synthetic construct
  source 1..20: mol_type = other DNA
ttcctgggaatgtccaaaaa

SEQ ID NO: 295218 - DNA, 20 bp, synthetic construct
  source 1..20: mol_type = other DNA
attcctgggaatgtccaaaa

SEQ ID NO: 295219 - DNA, 20 bp, synthetic construct
  source 1..20: mol_type = other DNA
cattcctgggaatgtccaaa

SEQ ID NO: 295220 - DNA, 20 bp, synthetic construct
  source 1..20: mol_type = other DNA
acattcctgggaatgtccaa

SEQ ID NO: 295221 - DNA, 20 bp, synthetic construct
  source 1..20: mol_type = other DNA
gacattcctgggaatgtcca

SEQ ID NO: 295222 - DNA, 20 bp, synthetic construct
  source 1..20: mol_type = other DNA
agacattcctgggaatgtcc

SEQ ID NO: 295223 - DNA, 20 bp, synthetic construct
  source 1..20: mol_type = other DNA
aagacattcctgggaatgtc

SEQ ID NO: 295224 - DNA, 20 bp, synthetic construct
  source 1..20: mol_type = other DNA
taagacattcctgggaatgt

SEQ ID NO: 295225 - DNA, 20 bp, synthetic construct
  source 1..20: mol_type = other DNA
ttaagacattcctgggaatg

SEQ ID NO: 295226 - DNA, 20 bp, synthetic construct
  source 1..20: mol_type = other DNA
tttaagacattcctgggaat

SEQ ID NO: 295227 - DNA, 20 bp, synthetic construct
  source 1..20: mol_type = other DNA
ttttaagacattcctgggaa

SEQ ID NO: 295228 - DNA, 20 bp, synthetic construct
  source 1..20: mol_type = other DNA
tttttaagacattcctggga

SEQ ID NO: 295229 - DNA, 20 bp, synthetic construct
  source 1..20: mol_type = other DNA
ttttttaagacattcctggg

SEQ ID NO: 295230 - DNA, 20 bp, synthetic construct
  source 1..20: mol_type = other DNA
gttttttaagacattcctgg

SEQ ID NO: 295231 - DNA, 20 bp, synthetic construct
  source 1..20: mol_type = other DNA
tgttttttaagacattcctg

SEQ ID NO: 295232 - DNA, 20 bp, synthetic construct
  source 1..20: mol_type = other DNA
gtgttttttaagacattcct

SEQ ID NO: 295233 - DNA, 20 bp, synthetic construct
  source 1..20: mol_type = other DNA
agtgttttttaagacattcc

SEQ ID NO: 295234 - DNA, 20 bp, synthetic construct
  source 1..20: mol_type = other DNA
aagtgttttttaagacattc

SEQ ID NO: 295235 - DNA, 20 bp, synthetic construct
  source 1..20: mol_type = other DNA
gaagtgttttttaagacatt

SEQ ID NO: 295236 - DNA, 20 bp, synthetic construct
  source 1..20: mol_type = other DNA
tgaagtgttttttaagacat

SEQ ID NO: 295237 - DNA, 20 bp, synthetic construct
  source 1..20: mol_type = other DNA
ttgaagtgttttttaagaca

SEQ ID NO: 295238 - DNA, 20 bp, synthetic construct
  source 1..20: mol_type = other DNA
tttgaagtgttttttaagac

SEQ ID NO: 295239 - DNA, 20 bp, synthetic construct
  source 1..20: mol_type = other DNA
ttttgaagtgttttttaaga

SEQ ID NO: 295240 - DNA, 20 bp, synthetic construct
  source 1..20: mol_type = other DNA
tttttgaagtgttttttaag

SEQ ID NO: 295241 - DNA, 20 bp, synthetic construct
  source 1..20: mol_type = other DNA
ttttttgaagtgttttttaa

SEQ ID NO: 295242 - DNA, 20 bp, synthetic construct
  source 1..20: mol_type = other DNA
gttttttgaagtgtttttta

SEQ ID NO: 295243 - DNA, 20 bp, synthetic construct
  source 1..20: mol_type = other DNA
tgttttttgaagtgtttttt

SEQ ID NO: 295244 - DNA, 20 bp, synthetic construct
  source 1..20: mol_type = other DNA
atgttttttgaagtgttttt

SEQ ID NO: 295245 - DNA, 20 bp, synthetic construct
  source 1..20: mol_type = other DNA
aatgttttttgaagtgtttt

SEQ ID NO: 295246 - DNA, 20 bp, synthetic construct
  source 1..20: mol_type = other DNA
taatgttttttgaagtgttt

SEQ ID NO: 295247 - DNA, 20 bp, synthetic construct
  source 1..20: mol_type = other DNA
ttaatgttttttgaagtgtt

SEQ ID NO: 295248 - DNA, 20 bp, synthetic construct
  source 1..20: mol_type = other DNA
gttaatgttttttgaagtgt

SEQ ID NO: 295249 - DNA, 20 bp, synthetic construct
  source 1..20: mol_type = other DNA
tgttaatgttttttgaagtg

SEQ ID NO: 295250 - DNA, 20 bp, synthetic construct
  source 1..20: mol_type = other DNA
atgttaatgttttttgaagt

SEQ ID NO: 295251 - DNA, 20 bp, synthetic construct
  source 1..20: mol_type = other DNA
tatgttaatgttttttgaag

SEQ ID NO: 295252 - DNA, 20 bp, synthetic construct
  source 1..20: mol_type = other DNA
ttatgttaatgttttttgaa

SEQ ID NO: 295253 - DNA, 20 bp, synthetic construct
  source 1..20: mol_type = other DNA
tttatgttaatgttttttga

SEQ ID NO: 295254 - DNA, 20 bp, synthetic construct
  source 1..20: mol_type = other DNA
atttatgttaatgttttttg

SEQ ID NO: 295255 - DNA, 20 bp, synthetic construct
  source 1..20: mol_type = other DNA
tatttatgttaatgtttttt

SEQ ID NO: 295256 - DNA, 20 bp, synthetic construct
  source 1..20: mol_type = other DNA
atatttatgttaatgttttt

SEQ ID NO: 295257 - DNA, 20 bp, synthetic construct
  source 1..20: mol_type = other DNA
aatatttatgttaatgtttt

SEQ ID NO: 295258 - DNA, 20 bp, synthetic construct
  source 1..20: mol_type = other DNA
aaatatttatgttaatgttt

SEQ ID NO: 295259 - DNA, 20 bp, synthetic construct
  source 1..20: mol_type = other DNA
aaaatatttatgttaatgtt

SEQ ID NO: 295260 - DNA, 20 bp, synthetic construct
  source 1..20: mol_type = other DNA
aaaaatatttatgttaatgt

SEQ ID NO: 295261 - DNA, 20 bp, synthetic construct
  source 1..20: mol_type = other DNA
taaaaatatttatgttaatg

SEQ ID NO: 295262 - DNA, 20 bp, synthetic construct
  source 1..20: mol_type = other DNA
ataaaaatatttatgttaat

SEQ ID NO: 295263 - DNA, 20 bp, synthetic construct
  source 1..20: mol_type = other DNA
gataaaaatatttatgttaa

SEQ ID NO: 295264 - DNA, 20 bp, synthetic construct
  source 1..20: mol_type = other DNA
tgataaaaatatttatgtta

SEQ ID NO: 295265 - DNA, 20 bp, synthetic construct
  source 1..20: mol_type = other DNA
ttgataaaaatatttatgtt

SEQ ID NO: 295266 - DNA, 20 bp, synthetic construct
  source 1..20: mol_type = other DNA
tttgataaaaatatttatgt

SEQ ID NO: 295267 - DNA, 20 bp, synthetic construct
  source 1..20: mol_type = other DNA
ctttgataaaaatatttatg

SEQ ID NO: 295268 - DNA, 20 bp, synthetic construct
  source 1..20: mol_type = other DNA
gctttgataaaaatatttat

SEQ ID NO: 295269 - DNA, 20 bp, synthetic construct
  source 1..20: mol_type = other DNA
ggctttgataaaaatattta

SEQ ID NO: 295270 - DNA, 20 bp, synthetic construct
  source 1..20: mol_type = other DNA
aggctttgataaaaatattt

SEQ ID NO: 295271 - DNA, 20 bp, synthetic construct
  source 1..20: mol_type = other DNA
caggctttgataaaaatatt

SEQ ID NO: 295272 - DNA, 20 bp, synthetic construct
  source 1..20: mol_type = other DNA
acaggctttgataaaaatat

SEQ ID NO: 295273 - DNA, 20 bp, synthetic construct
  source 1..20: mol_type = other DNA
tacaggctttgataaaaata

SEQ ID NO: 295274 - DNA, 20 bp, synthetic construct
  source 1..20: mol_type = other DNA
atacaggctttgataaaaat

SEQ ID NO: 295275 - DNA, 20 bp, synthetic construct
  source 1..20: mol_type = other DNA
aatacaggctttgataaaaa

SEQ ID NO: 295276 - DNA, 20 bp, synthetic construct
  source 1..20: mol_type = other DNA
taatacaggctttgataaaa

SEQ ID NO: 295277 - DNA, 20 bp, synthetic construct
  source 1..20: mol_type = other DNA
ttaatacaggctttgataaa

SEQ ID NO: 295278 - DNA, 20 bp, synthetic construct
  source 1..20: mol_type = other DNA
tttaatacaggctttgataa

SEQ ID NO: 295279 - DNA, 20 bp, synthetic construct
  source 1..20: mol_type = other DNA
atttaatacaggctttgata

SEQ ID NO: 295280 - DNA, 20 bp, synthetic construct
  source 1..20: mol_type = other DNA
catttaatacaggctttgat

SEQ ID NO: 295281 - DNA, 20 bp, synthetic construct
  source 1..20: mol_type = other DNA
ccatttaatacaggctttga

SEQ ID NO: 295282 - DNA, 20 bp, synthetic construct
  source 1..20: mol_type = other DNA
accatttaatacaggctttg

SEQ ID NO: 295283 - DNA, 20 bp, synthetic construct
  source 1..20: mol_type = other DNA
gaccatttaatacaggcttt

SEQ ID NO: 295284 - DNA, 20 bp, synthetic construct
  source 1..20: mol_type = other DNA
agaccatttaatacaggctt

SEQ ID NO: 295285 - DNA, 20 bp, synthetic construct
  source 1..20: mol_type = other DNA
aagaccatttaatacaggct

SEQ ID NO: 295286 - DNA, 20 bp, synthetic construct
  source 1..20: mol_type = other DNA
aaagaccatttaatacaggc

SEQ ID NO: 295287 - DNA, 20 bp, synthetic construct
  source 1..20: mol_type = other DNA
gaaagaccatttaatacagg

SEQ ID NO: 295288 - DNA, 20 bp, synthetic construct
  source 1..20: mol_type = other DNA
tgaaagaccatttaatacag

SEQ ID NO: 295289 - DNA, 20 bp, synthetic construct
  source 1..20: mol_type = other DNA
ttgaaagaccatttaataca

SEQ ID NO: 295290 - DNA, 20 bp, synthetic construct
  source 1..20: mol_type = other DNA
cttgaaagaccatttaatac

SEQ ID NO: 295291 - DNA, 20 bp, synthetic construct
  source 1..20: mol_type = other DNA
tcttgaaagaccatttaata

SEQ ID NO: 295292 - DNA, 20 bp, synthetic construct
  source 1..20: mol_type = other DNA
ttcttgaaagaccatttaat

SEQ ID NO: 295293 - DNA, 20 bp, synthetic construct
  source 1..20: mol_type = other DNA
tttcttgaaagaccatttaa

SEQ ID NO: 295294 - DNA, 20 bp, synthetic construct
  source 1..20: mol_type = other DNA
ttttcttgaaagaccattta

SEQ ID NO: 295295 - DNA, 20 bp, synthetic construct
  source 1..20: mol_type = other DNA
attttcttgaaagaccattt

SEQ ID NO: 295296 - DNA, 20 bp, synthetic construct
  source 1..20: mol_type = other DNA
tattttcttgaaagaccatt

SEQ ID NO: 295297 - DNA, 20 bp, synthetic construct
  source 1..20: mol_type = other DNA
gtattttcttgaaagaccat

SEQ ID NO: 295298 - DNA, 20 bp, synthetic construct
  source 1..20: mol_type = other DNA
tgtattttcttgaaagacca

SEQ ID NO: 295299 - DNA, 20 bp, synthetic construct
  source 1..20: mol_type = other DNA
ctgtattttcttgaaagacc

SEQ ID NO: 295300 - DNA, 20 bp, synthetic construct
  source 1..20: mol_type = other DNA
actgtattttcttgaaagac

SEQ ID NO: 295301 - DNA, 20 bp, synthetic construct
  source 1..20: mol_type = other DNA
tactgtattttcttgaaaga

SEQ ID NO: 295302 - DNA, 20 bp, synthetic construct
  source 1..20: mol_type = other DNA
ttactgtattttcttgaaag

SEQ ID NO: 295303 - DNA, 20 bp, synthetic construct
  source 1..20: mol_type = other DNA
gttactgtattttcttgaaa

SEQ ID NO: 295304 - DNA, 20 bp, synthetic construct
  source 1..20: mol_type = other DNA
tgttactgtattttcttgaa

SEQ ID NO: 295305 - DNA, 20 bp, synthetic construct
  source 1..20: mol_type = other DNA
ctgttactgtattttcttga

SEQ ID NO: 295306 - DNA, 20 bp, synthetic construct
  source 1..20: mol_type = other DNA
cctgttactgtattttcttg

SEQ ID NO: 295307 - DNA, 20 bp, synthetic construct
  source 1..20: mol_type = other DNA
acctgttactgtattttctt

SEQ ID NO: 295308 - DNA, 20 bp, synthetic construct
  source 1..20: mol_type = other DNA
gacctgttactgtattttct

SEQ ID NO: 295309 - DNA, 20 bp, synthetic construct
  source 1..20: mol_type = other DNA
tgacctgttactgtattttc

SEQ ID NO: 295310 - DNA, 20 bp, synthetic construct
  source 1..20: mol_type = other DNA
ctgacctgttactgtatttt

SEQ ID NO: 295311 - DNA, 20 bp, synthetic construct
  source 1..20: mol_type = other DNA
cctgacctgttactgtattt

SEQ ID NO: 295312 - DNA, 20 bp, synthetic construct
  source 1..20: mol_type = other DNA
gcctgacctgttactgtatt

SEQ ID NO: 295313 - DNA, 20 bp, synthetic construct
  source 1..20: mol_type = other DNA
tgcctgacctgttactgtat

SEQ ID NO: 295314 - DNA, 20 bp, synthetic construct
  source 1..20: mol_type = other DNA
atgcctgacctgttactgta

SEQ ID NO: 295315 - DNA, 20 bp, synthetic construct
  source 1..20: mol_type = other DNA
catgcctgacctgttactgt

SEQ ID NO: 295316 - DNA, 20 bp, synthetic construct
  source 1..20: mol_type = other DNA
ccatgcctgacctgttactg

SEQ ID NO: 295317 - DNA, 20 bp, synthetic construct
  source 1..20: mol_type = other DNA
accatgcctgacctgttact

SEQ ID NO: 295318 - DNA, 20 bp, synthetic construct
  source 1..20: mol_type = other DNA
caccatgcctgacctgttac

SEQ ID NO: 295319 - DNA, 20 bp, synthetic construct
  source 1..20: mol_type = other DNA
ccaccatgcctgacctgtta

SEQ ID NO: 295320 - DNA, 20 bp, synthetic construct
  source 1..20: mol_type = other DNA
gccaccatgcctgacctgtt

SEQ ID NO: 295321 - DNA, 20 bp, synthetic construct
  source 1..20: mol_type = other DNA
agccaccatgcctgacctgt

SEQ ID NO: 295322 - DNA, 20 bp, synthetic construct
  source 1..20: mol_type = other DNA
gagccaccatgcctgacctg

SEQ ID NO: 295323 - DNA, 20 bp, synthetic construct
  source 1..20: mol_type = other DNA
tgagccaccatgcctgacct

SEQ ID NO: 295324 - DNA, 20 bp, synthetic construct
  source 1..20: mol_type = other DNA
atgagccaccatgcctgacc

SEQ ID NO: 295325 - DNA, 20 bp, synthetic construct
  source 1..20: mol_type = other DNA
catgagccaccatgcctgac

SEQ ID NO: 295326 - DNA, 20 bp, synthetic construct
  source 1..20: mol_type = other DNA
gcatgagccaccatgcctga

SEQ ID NO: 295327 - DNA, 20 bp, synthetic construct
  source 1..20: mol_type = other DNA
ggcatgagccaccatgcctg

SEQ ID NO: 295328 - DNA, 20 bp, synthetic construct
  source 1..20: mol_type = other DNA
aggcatgagccaccatgcct

SEQ ID NO: 295329 - DNA, 20 bp, synthetic construct
  source 1..20: mol_type = other DNA
caggcatgagccaccatgcc

SEQ ID NO: 295330 - DNA, 20 bp, synthetic construct
  source 1..20: mol_type = other DNA
acaggcatgagccaccatgc

SEQ ID NO: 295331 - DNA, 20 bp, synthetic construct
  source 1..20: mol_type = other DNA
tacaggcatgagccaccatg

SEQ ID NO: 295332 - DNA, 20 bp, synthetic construct
  source 1..20: mol_type = other DNA
ttacaggcatgagccaccat

SEQ ID NO: 295333 - DNA, 20 bp, synthetic construct
  source 1..20: mol_type = other DNA
gttacaggcatgagccacca

SEQ ID NO: 295334 - DNA, 20 bp, synthetic construct
  source 1..20: mol_type = other DNA
ggttacaggcatgagccacc

SEQ ID NO: 295335 - DNA, 20 bp, synthetic construct
  source 1..20: mol_type = other DNA
gggttacaggcatgagccac

SEQ ID NO: 295336 - DNA, 20 bp, synthetic construct
  source 1..20: mol_type = other DNA
ggggttacaggcatgagcca

SEQ ID NO: 295337 - DNA, 20 bp, synthetic construct
  source 1..20: mol_type = other DNA
tggggttacaggcatgagcc

SEQ ID NO: 295338 - DNA, 20 bp, synthetic construct
  source 1..20: mol_type = other DNA
ctggggttacaggcatgagc

SEQ ID NO: 295339 - DNA, 20 bp, synthetic construct
  source 1..20: mol_type = other DNA
gctggggttacaggcatgag

SEQ ID NO: 295340 - DNA, 20 bp, synthetic construct
  source 1..20: mol_type = other DNA
tgctggggttacaggcatga

SEQ ID NO: 295341 - DNA, 20 bp, synthetic construct
  source 1..20: mol_type = other DNA
gtgctggggttacaggcatg

SEQ ID NO: 295342 - DNA, 20 bp, synthetic construct
  source 1..20: mol_type = other DNA
agtgctggggttacaggcat

SEQ ID NO: 295343 - DNA, 20 bp, synthetic construct
  source 1..20: mol_type = other DNA
aagtgctggggttacaggca

SEQ ID NO: 295344 - DNA, 20 bp, synthetic construct
  source 1..20: mol_type = other DNA
aaagtgctggggttacaggc

SEQ ID NO: 295345 - DNA, 20 bp, synthetic construct
  source 1..20: mol_type = other DNA
caaagtgctggggttacagg

SEQ ID NO: 295346 - DNA, 20 bp, synthetic construct
  source 1..20: mol_type = other DNA
ccaaagtgctggggttacag

SEQ ID NO: 295347 - DNA, 20 bp, synthetic construct
  source 1..20: mol_type = other DNA
cccaaagtgctggggttaca

SEQ ID NO: 295348 - DNA, 20 bp, synthetic construct
  source 1..20: mol_type = other DNA
tcccaaagtgctggggttac

SEQ ID NO: 295349 - DNA, 20 bp, synthetic construct
  source 1..20: mol_type = other DNA
ctcccaaagtgctggggtta

SEQ ID NO: 295350 - DNA, 20 bp, synthetic construct
  source 1..20: mol_type = other DNA
cctcccaaagtgctggggtt

SEQ ID NO: 295351 - DNA, 20 bp, synthetic construct
  source 1..20: mol_type = other DNA
gcctcccaaagtgctggggt

SEQ ID NO: 295352 - DNA, 20 bp, synthetic construct
  source 1..20: mol_type = other DNA
ggcctcccaaagtgctgggg

SEQ ID NO: 295353 - DNA, 20 bp, synthetic construct
  source 1..20: mol_type = other DNA
tggcctcccaaagtgctggg

SEQ ID NO: 295354 - DNA, 20 bp, synthetic construct
  source 1..20: mol_type = other DNA
ttggcctcccaaagtgctgg

SEQ ID NO: 295355 - DNA, 20 bp, synthetic construct
  source 1..20: mol_type = other DNA
cttggcctcccaaagtgctg

SEQ ID NO: 295356 - DNA, 20 bp, synthetic construct
  source 1..20: mol_type = other DNA
ccttggcctcccaaagtgct

SEQ ID NO: 295357 - DNA, 20 bp, synthetic construct
  source 1..20: mol_type = other DNA
gccttggcctcccaaagtgc

SEQ ID NO: 295358 - DNA, 20 bp, synthetic construct
  source 1..20: mol_type = other DNA
tgccttggcctcccaaagtg

SEQ ID NO: 295359 - DNA, 20 bp, synthetic construct
  source 1..20: mol_type = other DNA
ctgccttggcctcccaaagt

SEQ ID NO: 295360 - DNA, 20 bp, synthetic construct
  source 1..20: mol_type = other DNA
cctgccttggcctcccaaag

SEQ ID NO: 295361 - DNA, 20 bp, synthetic construct
  source 1..20: mol_type = other DNA
gcctgccttggcctcccaaa

SEQ ID NO: 295362 - DNA, 20 bp, synthetic construct
  source 1..20: mol_type = other DNA
tgcctgccttggcctcccaa

SEQ ID NO: 295363 - DNA, 20 bp, synthetic construct
  source 1..20: mol_type = other DNA
ctgcctgccttggcctccca

SEQ ID NO: 295364 - DNA, 20 bp, synthetic construct
  source 1..20: mol_type = other DNA
tctgcctgccttggcctccc

SEQ ID NO: 295365 - DNA, 20 bp, synthetic construct
  source 1..20: mol_type = other DNA
atctgcctgccttggcctcc

SEQ ID NO: 295366 - DNA, 20 bp, synthetic construct
  source 1..20: mol_type = other DNA
gatctgcctgccttggcctc

SEQ ID NO: 295367 - DNA, 20 bp, synthetic construct
  source 1..20: mol_type = other DNA
tgatctgcctgccttggcct

SEQ ID NO: 295368 - DNA, 20 bp, synthetic construct
  source 1..20: mol_type = other DNA
gtgatctgcctgccttggcc

SEQ ID NO: 295369 - DNA, 20 bp, synthetic construct
  source 1..20: mol_type = other DNA
ggtgatctgcctgccttggc

SEQ ID NO: 295370 - DNA, 20 bp, synthetic construct
  source 1..20: mol_type = other DNA
aggtgatctgcctgccttgg

SEQ ID NO: 295371 - DNA, 20 bp, synthetic construct
  source 1..20: mol_type = other DNA
caggtgatctgcctgccttg

SEQ ID NO: 295372 - DNA, 20 bp, synthetic construct
  source 1..20: mol_type = other DNA
tcaggtgatctgcctgcctt

SEQ ID NO: 295373 - DNA, 20 bp, synthetic construct
  source 1..20: mol_type = other DNA
ttcaggtgatctgcctgcct

SEQ ID NO: 295374 - DNA, 20 bp, synthetic construct
  source 1..20: mol_type = other DNA
tttcaggtgatctgcctgcc

SEQ ID NO: 295375 - DNA, 20 bp, synthetic construct
  source 1..20: mol_type = other DNA
atttcaggtgatctgcctgc

SEQ ID NO: 295376 - DNA, 20 bp, synthetic construct
  source 1..20: mol_type = other DNA
gatttcaggtgatctgcctg

SEQ ID NO: 295377 - DNA, 20 bp, synthetic construct
  source 1..20: mol_type = other DNA
tgatttcaggtgatctgcct

SEQ ID NO: 295378 - DNA, 20 bp, synthetic construct
  source 1..20: mol_type = other DNA
ctgatttcaggtgatctgcc

SEQ ID NO: 295379 - DNA, 20 bp, synthetic construct
  source 1..20: mol_type = other DNA
cctgatttcaggtgatctgc

SEQ ID NO: 295380 - DNA, 20 bp, synthetic construct
  source 1..20: mol_type = other DNA
tcctgatttcaggtgatctg

SEQ ID NO: 295381 - DNA, 20 bp, synthetic construct
  source 1..20: mol_type = other DNA
ctcctgatttcaggtgatct

SEQ ID NO: 295382 - DNA, 20 bp, synthetic construct
  source 1..20: mol_type = other DNA
actcctgatttcaggtgatc

SEQ ID NO: 295383 - DNA, 20 bp, synthetic construct
  source 1..20: mol_type = other DNA
aactcctgatttcaggtgat

SEQ ID NO: 295384 - DNA, 20 bp, synthetic construct
  source 1..20: mol_type = other DNA
gaactcctgatttcaggtga

SEQ ID NO: 295385 - DNA, 20 bp, synthetic construct
  source 1..20: mol_type = other DNA
tgaactcctgatttcaggtg

SEQ ID NO: 295386 - DNA, 20 bp, synthetic construct
  source 1..20: mol_type = other DNA
ttgaactcctgatttcaggt

SEQ ID NO: 295387 - DNA, 20 bp, synthetic construct
  source 1..20: mol_type = other DNA
cttgaactcctgatttcagg

SEQ ID NO: 295388 - DNA, 20 bp, synthetic construct
  source 1..20: mol_type = other DNA
tcttgaactcctgatttcag

SEQ ID NO: 295389 - DNA, 20 bp, synthetic construct
  source 1..20: mol_type = other DNA
gtcttgaactcctgatttca

SEQ ID NO: 295390 - DNA, 20 bp, synthetic construct
  source 1..20: mol_type = other DNA
ggtcttgaactcctgatttc

SEQ ID NO: 295391 - DNA, 20 bp, synthetic construct
  source 1..20: mol_type = other DNA
tggtcttgaactcctgattt

SEQ ID NO: 295392 - DNA, 20 bp, synthetic construct
  source 1..20: mol_type = other DNA
ttggtcttgaactcctgatt

SEQ ID NO: 295393 - DNA, 20 bp, synthetic construct
  source 1..20: mol_type = other DNA
gttggtcttgaactcctgat

SEQ ID NO: 295394 - DNA, 20 bp, synthetic construct
  source 1..20: mol_type = other DNA
ggttggtcttgaactcctga

SEQ ID NO: 295395 - DNA, 20 bp, synthetic construct
  source 1..20: mol_type = other DNA
aggttggtcttgaactcctg

SEQ ID NO: 295396 - DNA, 20 bp, synthetic construct
  source 1..20: mol_type = other DNA
caggttggtcttgaactcct

SEQ ID NO: 295397 - DNA, 20 bp, synthetic construct
  source 1..20: mol_type = other DNA
ccaggttggtcttgaactcc

SEQ ID NO: 295398 - DNA, 20 bp, synthetic construct
  source 1..20: mol_type = other DNA
gccaggttggtcttgaactc

SEQ ID NO: 295399 - DNA, 20 bp, synthetic construct
  source 1..20: mol_type = other DNA
ggccaggttggtcttgaact

SEQ ID NO: 295400 - DNA, 20 bp, synthetic construct
  source 1..20: mol_type = other DNA
tggccaggttggtcttgaac

SEQ ID NO: 295401 - DNA, 20 bp, synthetic construct
  source 1..20: mol_type = other DNA
ttggccaggttggtcttgaa

SEQ ID NO: 295402 - DNA, 20 bp, synthetic construct
  source 1..20: mol_type = other DNA
gttggccaggttggtcttga

SEQ ID NO: 295403 - DNA, 20 bp, synthetic construct
  source 1..20: mol_type = other DNA
tgttggccaggttggtcttg

SEQ ID NO: 295404 - DNA, 20 bp, synthetic construct
  source 1..20: mol_type = other DNA
gtgttggccaggttggtctt

SEQ ID NO: 295405 - DNA, 20 bp, synthetic construct
  source 1..20: mol_type = other DNA
tgtgttggccaggttggtct

SEQ ID NO: 295406 - DNA, 20 bp, synthetic construct
  source 1..20: mol_type = other DNA
ctgtgttggccaggttggtc

SEQ ID NO: 295407 - DNA, 20 bp, synthetic construct
  source 1..20: mol_type = other DNA
gctgtgttggccaggttggt

SEQ ID NO: 295408 - DNA, 20 bp, synthetic construct
  source 1..20: mol_type = other DNA
ggctgtgttggccaggttgg

SEQ ID NO: 295409 - DNA, 20 bp, synthetic construct
  source 1..20: mol_type = other DNA
tggctgtgttggccaggttg

SEQ ID NO: 295410 - DNA, 20 bp, synthetic construct
  source 1..20: mol_type = other DNA
ttggctgtgttggccaggtt

SEQ ID NO: 295411 - DNA, 20 bp, synthetic construct
  source 1..20: mol_type = other DNA
tttggctgtgttggccaggt

SEQ ID NO: 295412 - DNA, 20 bp, synthetic construct
  source 1..20: mol_type = other DNA
atttggctgtgttggccagg

SEQ ID NO: 295413 - DNA, 20 bp, synthetic construct
  source 1..20: mol_type = other DNA
gatttggctgtgttggccag

SEQ ID NO: 295414 - DNA, 20 bp, synthetic construct
  source 1..20: mol_type = other DNA
ggatttggctgtgttggcca

SEQ ID NO: 295415 - DNA, 20 bp, synthetic construct
  source 1..20: mol_type = other DNA
gggatttggctgtgttggcc

SEQ ID NO: 295416 - DNA, 20 bp, synthetic construct
  source 1..20: mol_type = other DNA
tgggatttggctgtgttggc

SEQ ID NO: 295417 - DNA, 20 bp, synthetic construct
  source 1..20: mol_type = other DNA
atgggatttggctgtgttgg

SEQ ID NO: 295418 - DNA, 20 bp, synthetic construct
  source 1..20: mol_type = other DNA
gatgggatttggctgtgttg

SEQ ID NO: 295419 - DNA, 20 bp, synthetic construct
  source 1..20: mol_type = other DNA
agatgggatttggctgtgtt

SEQ ID NO: 295420 - DNA, 20 bp, synthetic construct
  source 1..20: mol_type = other DNA
gagatgggatttggctgtgt

SEQ ID NO: 295421 - DNA, 20 bp, synthetic construct
  source 1..20: mol_type = other DNA
agagatgggatttggctgtg

SEQ ID NO: 295422 - DNA, 20 bp, synthetic construct
  source 1..20: mol_type = other DNA
tagagatgggatttggctgt

SEQ ID NO: 295423 - DNA, 20 bp, synthetic construct
  source 1..20: mol_type = other DNA
gtagagatgggatttggctg

SEQ ID NO: 295424 - DNA, 20 bp, synthetic construct
  source 1..20: mol_type = other DNA
tgtagagatgggatttggct

SEQ ID NO: 295425 - DNA, 20 bp, synthetic construct
  source 1..20: mol_type = other DNA
ttgtagagatgggatttggc

SEQ ID NO: 295426 - DNA, 20 bp, synthetic construct
  source 1..20: mol_type = other DNA
tttgtagagatgggatttgg

SEQ ID NO: 295427 - DNA, 20 bp, synthetic construct
  source 1..20: mol_type = other DNA
ttttgtagagatgggatttg

SEQ ID NO: 295428 - DNA, 20 bp, synthetic construct
  source 1..20: mol_type = other DNA
tttttgtagagatgggattt

SEQ ID NO: 295429 - DNA, 20 bp, synthetic construct
  source 1..20: mol_type = other DNA
ttttttgtagagatgggatt

SEQ ID NO: 295430 - DNA, 20 bp, synthetic construct
  source 1..20: mol_type = other DNA
attttttgtagagatgggat

SEQ ID NO: 295431 - DNA, 20 bp, synthetic construct
  source 1..20: mol_type = other DNA
tattttttgtagagatggga

SEQ ID NO: 295432 - DNA, 20 bp, synthetic construct
  source 1..20: mol_type = other DNA
gtattttttgtagagatggg

SEQ ID NO: 295433 - DNA, 20 bp, synthetic construct
  source 1..20: mol_type = other DNA
tgtattttttgtagagatgg

SEQ ID NO: 295434 - DNA, 20 bp, synthetic construct
  source 1..20: mol_type = other DNA
ttgtattttttgtagagatg

SEQ ID NO: 295435 - DNA, 20 bp, synthetic construct
  source 1..20: mol_type = other DNA
tttgtattttttgtagagat

SEQ ID NO: 295436 - DNA, 20 bp, synthetic construct
  source 1..20: mol_type = other DNA
ttttgtattttttgtagaga

SEQ ID NO: 295437 - DNA, 20 bp, synthetic construct
  source 1..20: mol_type = other DNA
tttttgtattttttgtagag

SEQ ID NO: 295438 - DNA, 20 bp, synthetic construct
  source 1..20: mol_type = other DNA
atttttgtattttttgtaga

SEQ ID NO: 295439 - DNA, 20 bp, synthetic construct
  source 1..20: mol_type = other DNA
aatttttgtattttttgtag

SEQ ID NO: 295440 - DNA, 20 bp, synthetic construct
  source 1..20: mol_type = other DNA
taatttttgtattttttgta

SEQ ID NO: 295441 - DNA, 20 bp, synthetic construct
  source 1..20: mol_type = other DNA
ctaatttttgtattttttgt

SEQ ID NO: 295442 - DNA, 20 bp, synthetic construct
  source 1..20: mol_type = other DNA
gctaatttttgtattttttg

SEQ ID NO: 295443 - DNA, 20 bp, synthetic construct
  source 1..20: mol_type = other DNA
agctaatttttgtatttttt

SEQ ID NO: 295444 - DNA, 20 bp, synthetic construct
  source 1..20: mol_type = other DNA
cagctaatttttgtattttt

SEQ ID NO: 295445 - DNA, 20 bp, synthetic construct
  source 1..20: mol_type = other DNA
ccagctaatttttgtatttt

SEQ ID NO: 295446 - DNA, 20 bp, synthetic construct
  source 1..20: mol_type = other DNA
cccagctaatttttgtattt

SEQ ID NO: 295447 - DNA, 20 bp, synthetic construct
  source 1..20: mol_type = other DNA
acccagctaatttttgtatt

SEQ ID NO: 295448 - DNA, 20 bp, synthetic construct
  source 1..20: mol_type = other DNA
cacccagctaatttttgtat

SEQ ID NO: 295449 - DNA, 20 bp, synthetic construct
  source 1..20: mol_type = other DNA
acacccagctaatttttgta

SEQ ID NO: 295450 - DNA, 20 bp, synthetic construct
  source 1..20: mol_type = other DNA
cacacccagctaatttttgt

SEQ ID NO: 295451 - DNA, 20 bp, synthetic construct
  source 1..20: mol_type = other DNA
ccacacccagctaatttttg

SEQ ID NO: 295452 - DNA, 20 bp, synthetic construct
  source 1..20: mol_type = other DNA
accacacccagctaattttt

SEQ ID NO: 295453 - DNA, 20 bp, synthetic construct
  source 1..20: mol_type = other DNA
caccacacccagctaatttt

SEQ ID NO: 295454 - DNA, 20 bp, synthetic construct
  source 1..20: mol_type = other DNA
ccaccacacccagctaattt

SEQ ID NO: 295455 - DNA, 20 bp, synthetic construct
  source 1..20: mol_type = other DNA
gccaccacacccagctaatt

SEQ ID NO: 295456 - DNA, 20 bp, synthetic construct
  source 1..20: mol_type = other DNA
tgccaccacacccagctaat

SEQ ID NO: 295457 - DNA, 20 bp, synthetic construct
  source 1..20: mol_type = other DNA
gtgccaccacacccagctaa

SEQ ID NO: 295458 - DNA, 20 bp, synthetic construct
  source 1..20: mol_type = other DNA
tgtgccaccacacccagcta

SEQ ID NO: 295459 - DNA, 20 bp, synthetic construct
  source 1..20: mol_type = other DNA
gtgtgccaccacacccagct

SEQ ID NO: 295460 - DNA, 20 bp, synthetic construct
  source 1..20: mol_type = other DNA
tgtgtgccaccacacccagc

SEQ ID NO: 295461 - DNA, 20 bp, synthetic construct
  source 1..20: mol_type = other DNA
gtgtgtgccaccacacccag

SEQ ID NO: 295462 - DNA, 20 bp, synthetic construct
  source 1..20: mol_type = other DNA
ggtgtgtgccaccacaccca

SEQ ID NO: 295463 - DNA, 20 bp, synthetic construct
  source 1..20: mol_type = other DNA
aggtgtgtgccaccacaccc

SEQ ID NO: 295464 - DNA, 20 bp, synthetic construct
  source 1..20: mol_type = other DNA
caggtgtgtgccaccacacc

SEQ ID NO: 295465 - DNA, 20 bp, synthetic construct
  source 1..20: mol_type = other DNA
acaggtgtgtgccaccacac

SEQ ID NO: 295466 - DNA, 20 bp, synthetic construct
  source 1..20: mol_type = other DNA
tacaggtgtgtgccaccaca

SEQ ID NO: 295467 - DNA, 20 bp, synthetic construct
  source 1..20: mol_type = other DNA
ctacaggtgtgtgccaccac

SEQ ID NO: 295468 - DNA, 20 bp, synthetic construct
  source 1..20: mol_type = other DNA
actacaggtgtgtgccacca

SEQ ID NO: 295469 - DNA, 20 bp, synthetic construct
  source 1..20: mol_type = other DNA
gactacaggtgtgtgccacc

SEQ ID NO: 295470 - DNA, 20 bp, synthetic construct
  source 1..20: mol_type = other DNA
ggactacaggtgtgtgccac

SEQ ID NO: 295471 - DNA, 20 bp, synthetic construct
  source 1..20: mol_type = other DNA
gggactacaggtgtgtgcca

SEQ ID NO: 295472 - DNA, 20 bp, synthetic construct
  source 1..20: mol_type = other DNA
tgggactacaggtgtgtgcc

SEQ ID NO: 295473 - DNA, 20 bp, synthetic construct
  source 1..20: mol_type = other DNA
ctgggactacaggtgtgtgc

SEQ ID NO: 295474 - DNA, 20 bp, synthetic construct
  source 1..20: mol_type = other DNA
gctgggactacaggtgtgtg

SEQ ID NO: 295475 - DNA, 20 bp, synthetic construct
  source 1..20: mol_type = other DNA
agctgggactacaggtgtgt

SEQ ID NO: 295476 - DNA, 20 bp, synthetic construct
  source 1..20: mol_type = other DNA
tagctgggactacaggtgtg

SEQ ID NO: 295477 - DNA, 20 bp, synthetic construct
  source 1..20: mol_type = other DNA
gtagctgggactacaggtgt

SEQ ID NO: 295478 - DNA, 20 bp, synthetic construct
  source 1..20: mol_type = other DNA
agtagctgggactacaggtg

SEQ ID NO: 295479 - DNA, 20 bp, synthetic construct
  source 1..20: mol_type = other DNA
aagtagctgggactacaggt

SEQ ID NO: 295480 - DNA, 20 bp, synthetic construct
  source 1..20: mol_type = other DNA
caagtagctgggactacagg

SEQ ID NO: 295481 - DNA, 20 bp, synthetic construct
  source 1..20: mol_type = other DNA
ccaagtagctgggactacag

SEQ ID NO: 295482 - DNA, 20 bp, synthetic construct
  source 1..20: mol_type = other DNA
cccaagtagctgggactaca

SEQ ID NO: 295483 - DNA, 20 bp, synthetic construct
  source 1..20: mol_type = other DNA
tcccaagtagctgggactac

SEQ ID NO: 295484 - DNA, 20 bp, synthetic construct
  source 1..20: mol_type = other DNA
ctcccaagtagctgggacta

SEQ ID NO: 295485 - DNA, 20 bp, synthetic construct
  source 1..20: mol_type = other DNA
cctcccaagtagctgggact

SEQ ID NO: 295486 - DNA, 20 bp, synthetic construct
  source 1..20: mol_type = other DNA
gcctcccaagtagctgggac

SEQ ID NO: 295487 - DNA, 20 bp, synthetic construct
  source 1..20: mol_type = other DNA
ggcctcccaagtagctggga

SEQ ID NO: 295488 - DNA, 20 bp, synthetic construct
  source 1..20: mol_type = other DNA
cggcctcccaagtagctggg

SEQ ID NO: 295489 - DNA, 20 bp, synthetic construct
  source 1..20: mol_type = other DNA
tcggcctcccaagtagctgg

SEQ ID NO: 295490 - DNA, 20 bp, synthetic construct
  source 1..20: mol_type = other DNA
ctcggcctcccaagtagctg

SEQ ID NO: 295491 - DNA, 20 bp, synthetic construct
  source 1..20: mol_type = other DNA
cctcggcctcccaagtagct

SEQ ID NO: 295492 - DNA, 20 bp, synthetic construct
  source 1..20: mol_type = other DNA
gcctcggcctcccaagtagc

SEQ ID NO: 295493 - DNA, 20 bp, synthetic construct
  source 1..20: mol_type = other DNA
tgcctcggcctcccaagtag

SEQ ID NO: 295494 - DNA, 20 bp, synthetic construct
  source 1..20: mol_type = other DNA
ctgcctcggcctcccaagta

SEQ ID NO: 295495 - DNA, 20 bp, synthetic construct
  source 1..20: mol_type = other DNA
cctgcctcggcctcccaagt

SEQ ID NO: 295496 - DNA, 20 bp, synthetic construct
  source 1..20: mol_type = other DNA
tcctgcctcggcctcccaag

SEQ ID NO: 295497 - DNA, 20 bp, synthetic construct
  source 1..20: mol_type = other DNA
ctcctgcctcggcctcccaa

SEQ ID NO: 295498 - DNA, 20 bp, synthetic construct
  source 1..20: mol_type = other DNA
tctcctgcctcggcctccca

SEQ ID NO: 295499 - DNA, 20 bp, synthetic construct
  source 1..20: mol_type = other DNA
ttctcctgcctcggcctccc

SEQ ID NO: 295500 - DNA, 20 bp, synthetic construct
  source 1..20: mol_type = other DNA
attctcctgcctcggcctcc

SEQ ID NO: 295501 - DNA, 20 bp, synthetic construct
  source 1..20: mol_type = other DNA
aattctcctgcctcggcctc

SEQ ID NO: 295502 - DNA, 20 bp, synthetic construct
  source 1..20: mol_type = other DNA
caattctcctgcctcggcct

SEQ ID NO: 295503 - DNA, 20 bp, synthetic construct
  source 1..20: mol_type = other DNA
gcaattctcctgcctcggcc

SEQ ID NO: 295504 - DNA, 20 bp, synthetic construct
  source 1..20: mol_type = other DNA
agcaattctcctgcctcggc

SEQ ID NO: 295505 - DNA, 20 bp, synthetic construct
  source 1..20: mol_type = other DNA
aagcaattctcctgcctcgg

SEQ ID NO: 295506 - DNA, 20 bp, synthetic construct
  source 1..20: mol_type = other DNA
caagcaattctcctgcctcg

SEQ ID NO: 295507 - DNA, 20 bp, synthetic construct
  source 1..20: mol_type = other DNA
tcaagcaattctcctgcctc

SEQ ID NO: 295508 - DNA, 20 bp, synthetic construct
  source 1..20: mol_type = other DNA
atcaagcaattctcctgcct

SEQ ID NO: 295509 - DNA, 20 bp, synthetic construct
  source 1..20: mol_type = other DNA
gatcaagcaattctcctgcc

SEQ ID NO: 295510 - DNA, 20 bp, synthetic construct
  source 1..20: mol_type = other DNA
ggatcaagcaattctcctgc

SEQ ID NO: 295511 - DNA, 20 bp, synthetic construct
  source 1..20: mol_type = other DNA
gggatcaagcaattctcctg

SEQ ID NO: 295512 - DNA, 20 bp, synthetic construct
  source 1..20: mol_type = other DNA
cgggatcaagcaattctcct

SEQ ID NO: 295513 - DNA, 20 bp, synthetic construct
  source 1..20: mol_type = other DNA
ccgggatcaagcaattctcc

SEQ ID NO: 295514 - DNA, 20 bp, synthetic construct
  source 1..20: mol_type = other DNA
tccgggatcaagcaattctc

SEQ ID NO: 295515 - DNA, 20 bp, synthetic construct
  source 1..20: mol_type = other DNA
ctccgggatcaagcaattct

SEQ ID NO: 295516 - DNA, 20 bp, synthetic construct
  source 1..20: mol_type = other DNA
cctccgggatcaagcaattc

SEQ ID NO: 295517 - DNA, 20 bp, synthetic construct
  source 1..20: mol_type = other DNA
gcctccgggatcaagcaatt

SEQ ID NO: 295518 - DNA, 20 bp, synthetic construct
  source 1..20: mol_type = other DNA
cgcctccgggatcaagcaat

SEQ ID NO: 295519 - DNA, 20 bp, synthetic construct
  source 1..20: mol_type = other DNA
ccgcctccgggatcaagcaa

SEQ ID NO: 295520 - DNA, 20 bp, synthetic construct
  source 1..20: mol_type = other DNA
tccgcctccgggatcaagca

SEQ ID NO: 295521 - DNA, 20 bp, synthetic construct
  source 1..20: mol_type = other DNA
ctccgcctccgggatcaagc

SEQ ID NO: 295522 - DNA, 20 bp, synthetic construct
  source 1..20: mol_type = other DNA
cctccgcctccgggatcaag

SEQ ID NO: 295523 - DNA, 20 bp, synthetic construct
  source 1..20: mol_type = other DNA
acctccgcctccgggatcaa

SEQ ID NO: 295524 - DNA, 20 bp, synthetic construct
  source 1..20: mol_type = other DNA
aacctccgcctccgggatca

SEQ ID NO: 295525 - DNA, 20 bp, synthetic construct
  source 1..20: mol_type = other DNA
caacctccgcctccgggatc

SEQ ID NO: 295526 - DNA, 20 bp, synthetic construct
  source 1..20: mol_type = other DNA
gcaacctccgcctccgggat

SEQ ID NO: 295527 - DNA, 20 bp, synthetic construct
  source 1..20: mol_type = other DNA
tgcaacctccgcctccggga

SEQ ID NO: 295528 - DNA, 20 bp, synthetic construct
  source 1..20: mol_type = other DNA
ctgcaacctccgcctccggg

SEQ ID NO: 295529 - DNA, 20 bp, synthetic construct
  source 1..20: mol_type = other DNA
actgcaacctccgcctccgg

SEQ ID NO: 295530 - DNA, 20 bp, synthetic construct
  source 1..20: mol_type = other DNA
cactgcaacctccgcctccg

SEQ ID NO: 295531 - DNA, 20 bp, synthetic construct
  source 1..20: mol_type = other DNA
tcactgcaacctccgcctcc

SEQ ID NO: 295532 - DNA, 20 bp, synthetic construct
  source 1..20: mol_type = other DNA
ctcactgcaacctccgcctc

SEQ ID NO: 295533 - DNA, 20 bp, synthetic construct
  source 1..20: mol_type = other DNA
gctcactgcaacctccgcct

SEQ ID NO: 295534 - DNA, 20 bp, synthetic construct
  source 1..20: mol_type = other DNA
agctcactgcaacctccgcc

SEQ ID NO: 295535 - DNA, 20 bp, synthetic construct
  source 1..20: mol_type = other DNA
cagctcactgcaacctccgc

SEQ ID NO: 295536 - DNA, 20 bp, synthetic construct
  source 1..20: mol_type = other DNA
tcagctcactgcaacctccg

SEQ ID NO: 295537 - DNA, 20 bp, synthetic construct
  source 1..20: mol_type = other DNA
ctcagctcactgcaacctcc

SEQ ID NO: 295538 - DNA, 20 bp, synthetic construct
  source 1..20: mol_type = other DNA
tctcagctcactgcaacctc

SEQ ID NO: 295539 - DNA, 20 bp, synthetic construct
  source 1..20: mol_type = other DNA
atctcagctcactgcaacct

SEQ ID NO: 295540 - DNA, 20 bp, synthetic construct
  source 1..20: mol_type = other DNA
gatctcagctcactgcaacc

SEQ ID NO: 295541 - DNA, 20 bp, synthetic construct
  source 1..20: mol_type = other DNA
cgatctcagctcactgcaac

SEQ ID NO: 295542 - DNA, 20 bp, synthetic construct
  source 1..20: mol_type = other DNA
acgatctcagctcactgcaa

SEQ ID NO: 295543 - DNA, 20 bp, synthetic construct
  source 1..20: mol_type = other DNA
cacgatctcagctcactgca

SEQ ID NO: 295544 - DNA, 20 bp, synthetic construct
  source 1..20: mol_type = other DNA
gcacgatctcagctcactgc

SEQ ID NO: 295545 - DNA, 20 bp, synthetic construct
  source 1..20: mol_type = other DNA
ggcacgatctcagctcactg

SEQ ID NO: 295546 - DNA, 20 bp, synthetic construct
  source 1..20: mol_type = other DNA
tggcacgatctcagctcact

SEQ ID NO: 295547 - DNA, 20 bp, synthetic construct
  source 1..20: mol_type = other DNA
gtggcacgatctcagctcac

SEQ ID NO: 295548 - DNA, 20 bp, synthetic construct
  source 1..20: mol_type = other DNA
agtggcacgatctcagctca

SEQ ID NO: 295549 - DNA, 20 bp, synthetic construct
  source 1..20: mol_type = other DNA
cagtggcacgatctcagctc

SEQ ID NO: 295550 - DNA, 20 bp, synthetic construct
  source 1..20: mol_type = other DNA
gcagtggcacgatctcagct

SEQ ID NO: 295551 - DNA, 20 bp, synthetic construct
  source 1..20: mol_type = other DNA
tgcagtggcacgatctcagc

SEQ ID NO: 295552 - DNA, 20 bp, synthetic construct
  source 1..20: mol_type = other DNA
gtgcagtggcacgatctcag

SEQ ID NO: 295553 - DNA, 20 bp, synthetic construct
  source 1..20: mol_type = other DNA
agtgcagtggcacgatctca

SEQ ID NO: 295554 - DNA, 20 bp, synthetic construct
  source 1..20: mol_type = other DNA
gagtgcagtggcacgatctc

SEQ ID NO: 295555 - DNA, 20 bp, synthetic construct
  source 1..20: mol_type = other DNA
ggagtgcagtggcacgatct

SEQ ID NO: 295556 - DNA, 20 bp, synthetic construct
  source 1..20: mol_type = other DNA
tggagtgcagtggcacgatc

SEQ ID NO: 295557 - DNA, 20 bp, synthetic construct
  source 1..20: mol_type = other DNA
ctggagtgcagtggcacgat

SEQ ID NO: 295558 - DNA, 20 bp, synthetic construct
  source 1..20: mol_type = other DNA
gctggagtgcagtggcacga

SEQ ID NO: 295559 - DNA, 20 bp, synthetic construct
  source 1..20: mol_type = other DNA
cgctggagtgcagtggcacg

SEQ ID NO: 295560 - DNA, 20 bp, synthetic construct
  source 1..20: mol_type = other DNA
acgctggagtgcagtggcac

SEQ ID NO: 295561 - DNA, 20 bp, synthetic construct
  source 1..20: mol_type = other DNA
cacgctggagtgcagtggca

SEQ ID NO: 295562 - DNA, 20 bp, synthetic construct
  source 1..20: mol_type = other DNA
ccacgctggagtgcagtggc

SEQ ID NO: 295563 - DNA, 20 bp, synthetic construct
  source 1..20: mol_type = other DNA
cccacgctggagtgcagtgg

SEQ ID NO: 295564 - DNA, 20 bp, synthetic construct
  source 1..20: mol_type = other DNA
acccacgctggagtgcagtg

SEQ ID NO: 295565 - DNA, 20 bp, synthetic construct
  source 1..20: mol_type = other DNA
cacccacgctggagtgcagt

SEQ ID NO: 295566 - DNA, 20 bp, synthetic construct
  source 1..20: mol_type = other DNA
tcacccacgctggagtgcag

SEQ ID NO: 295567 - DNA, 20 bp, synthetic construct
  source 1..20: mol_type = other DNA
gtcacccacgctggagtgca

SEQ ID NO: 295568 - DNA, 20 bp, synthetic construct
  source 1..20: mol_type = other DNA
tgtcacccacgctggagtgc

SEQ ID NO: 295569 - DNA, 20 bp, synthetic construct
  source 1..20: mol_type = other DNA
ttgtcacccacgctggagtg

SEQ ID NO: 295570 - DNA, 20 bp, synthetic construct
  source 1..20: mol_type = other DNA
cttgtcacccacgctggagt

SEQ ID NO: 295571 - DNA, 20 bp, synthetic construct
  source 1..20: mol_type = other DNA
ccttgtcacccacgctggag

SEQ ID NO: 295572 - DNA, 20 bp, synthetic construct
  source 1..20: mol_type = other DNA
accttgtcacccacgctgga

SEQ ID NO: 295573 - DNA, 20 bp, synthetic construct
  source 1..20: mol_type = other DNA
caccttgtcacccacgctgg

SEQ ID NO: 295574 - DNA, 20 bp, synthetic construct
  source 1..20: mol_type = other DNA
tcaccttgtcacccacgctg

SEQ ID NO: 295575 - DNA, 20 bp, synthetic construct
  source 1..20: mol_type = other DNA
ttcaccttgtcacccacgct

SEQ ID NO: 295576 - DNA, 20 bp, synthetic construct
  source 1..20: mol_type = other DNA
attcaccttgtcacccacgc

SEQ ID NO: 295577 - DNA, 20 bp, synthetic construct
  source 1..20: mol_type = other DNA
gattcaccttgtcacccacg

SEQ ID NO: 295578 - DNA, 20 bp, synthetic construct
  source 1..20: mol_type = other DNA
agattcaccttgtcacccac

SEQ ID NO: 295579 - DNA, 20 bp, synthetic construct
  source 1..20: mol_type = other DNA
aagattcaccttgtcaccca

SEQ ID NO: 295580 - DNA, 20 bp, synthetic construct
  source 1..20: mol_type = other DNA
aaagattcaccttgtcaccc

SEQ ID NO: 295581 - DNA, 20 bp, synthetic construct
  source 1..20: mol_type = other DNA
caaagattcaccttgtcacc

SEQ ID NO: 295582 - DNA, 20 bp, synthetic construct
  source 1..20: mol_type = other DNA
acaaagattcaccttgtcac

SEQ ID NO: 295583 - DNA, 20 bp, synthetic construct
  source 1..20: mol_type = other DNA
gacaaagattcaccttgtca

SEQ ID NO: 295584 - DNA, 20 bp, synthetic construct
  source 1..20: mol_type = other DNA
agacaaagattcaccttgtc

SEQ ID NO: 295585 - DNA, 20 bp, synthetic construct
  source 1..20: mol_type = other DNA
gagacaaagattcaccttgt

SEQ ID NO: 295586 - DNA, 20 bp, synthetic construct
  source 1..20: mol_type = other DNA
tgagacaaagattcaccttg

SEQ ID NO: 295587 - DNA, 20 bp, synthetic construct
  source 1..20: mol_type = other DNA
ttgagacaaagattcacctt

SEQ ID NO: 295588 - DNA, 20 bp, synthetic construct
  source 1..20: mol_type = other DNA
tttgagacaaagattcacct

SEQ ID NO: 295589 - DNA, 20 bp, synthetic construct
  source 1..20: mol_type = other DNA
ttttgagacaaagattcacc

SEQ ID NO: 295590 - DNA, 20 bp, synthetic construct
  source 1..20: mol_type = other DNA
tttttgagacaaagattcac

SEQ ID NO: 295591 - DNA, 20 bp, synthetic construct
  source 1..20: mol_type = other DNA
ttttttgagacaaagattca

SEQ ID NO: 295592 - DNA, 20 bp, synthetic construct
  source 1..20: mol_type = other DNA
tttttttgagacaaagattc

SEQ ID NO: 295593 - DNA, 20 bp, synthetic construct
  source 1..20: mol_type = other DNA
ttttttttgagacaaagatt

SEQ ID NO: 295594 - DNA, 20 bp, synthetic construct
  source 1..20: mol_type = other DNA
tttttttttgagacaaagat

SEQ ID NO: 295595 - DNA, 20 bp, synthetic construct
  source 1..20: mol_type = other DNA
ttttttttttgagacaaaga

SEQ ID NO: 295596 - DNA, 20 bp, synthetic construct
  source 1..20: mol_type = other DNA
tttttttttttgagacaaag

SEQ ID NO: 295597 - DNA, 20 bp, synthetic construct
  source 1..20: mol_type = other DNA
ttttttttttttgagacaaa

SEQ ID NO: 295598 - DNA, 20 bp, synthetic construct
  source 1..20: mol_type = other DNA
tttttttttttttgagacaa

SEQ ID NO: 295599 - DNA, 20 bp, synthetic construct
  source 1..20: mol_type = other DNA
ttttttttttttttgagaca

SEQ ID NO: 295600 - DNA, 20 bp, synthetic construct
  source 1..20: mol_type = other DNA
tttttttttttttttgagac

SEQ ID NO: 295601 - DNA, 20 bp, synthetic construct
  source 1..20: mol_type = other DNA
ttttttttttttttttgaga

SEQ ID NO: 295602 - DNA, 20 bp, synthetic construct
  source 1..20: mol_type = other DNA
tttttttttttttttttgag

SEQ ID NO: 295603 - DNA, 20 bp, synthetic construct
  source 1..20: mol_type = other DNA
ttttttttttttttttttga

SEQ ID NO: 295604 - DNA, 20 bp, synthetic construct
  source 1..20: mol_type = other DNA
tttttttttttttttttttg

SEQ ID NO: 295605 - DNA, 20 bp, synthetic construct
  source 1..20: mol_type = other DNA
tttttttttttttttttttt

SEQ ID NO: 295606 - DNA, 20 bp, synthetic construct
  source 1..20: mol_type = other DNA
cttttttttttttttttttt

SEQ ID NO: 295607 - DNA, 20 bp, synthetic construct
  source 1..20: mol_type = other DNA
tctttttttttttttttttt

SEQ ID NO: 295608 - DNA, 20 bp, synthetic construct
  source 1..20: mol_type = other DNA
atcttttttttttttttttt

SEQ ID NO: 295609 - DNA, 20 bp, synthetic construct
  source 1..20: mol_type = other DNA
tatctttttttttttttttt

SEQ ID NO: 295610 - DNA, 20 bp, synthetic construct
  source 1..20: mol_type = other DNA
ttatcttttttttttttttt

SEQ ID NO: 295611 - DNA, 20 bp, synthetic construct
  source 1..20: mol_type = other DNA
tttatctttttttttttttt

SEQ ID NO: 295612 - DNA, 20 bp, synthetic construct
  source 1..20: mol_type = other DNA
ttttatcttttttttttttt

SEQ ID NO: 295613 - DNA, 20 bp, synthetic construct
  source 1..20: mol_type = other DNA
attttatctttttttttttt

SEQ ID NO: 295614 - DNA, 20 bp, synthetic construct
  source 1..20: mol_type = other DNA
tattttatcttttttttttt

SEQ ID NO: 295615 - DNA, 20 bp, synthetic construct
  source 1..20: mol_type = other DNA
gtattttatctttttttttt

SEQ ID NO: 295616 - DNA, 20 bp, synthetic construct
  source 1..20: mol_type = other DNA
tgtattttatcttttttttt

SEQ ID NO: 295617 - DNA, 20 bp, synthetic construct
  source 1..20: mol_type = other DNA
ctgtattttatctttttttt

SEQ ID NO: 295618 - DNA, 20 bp, synthetic construct
  source 1..20: mol_type = other DNA
actgtattttatcttttttt

SEQ ID NO: 295619 - DNA, 20 bp, synthetic construct
  source 1..20: mol_type = other DNA
tactgtattttatctttttt

SEQ ID NO: 295620 - DNA, 20 bp, synthetic construct
  source 1..20: mol_type = other DNA
atactgtattttatcttttt

SEQ ID NO: 295621 - DNA, 20 bp, synthetic construct
  source 1..20: mol_type = other DNA
tatactgtattttatctttt

SEQ ID NO: 295622 - DNA, 20 bp, synthetic construct
  source 1..20: mol_type = other DNA
gtatactgtattttatcttt

SEQ ID NO: 295623 - DNA, 20 bp, synthetic construct
  source 1..20: mol_type = other DNA
tgtatactgtattttatctt

SEQ ID NO: 295624 - DNA, 20 bp, synthetic construct
  source 1..20: mol_type = other DNA
ctgtatactgtattttatct

SEQ ID NO: 295625 - DNA, 20 bp, synthetic construct
  source 1..20: mol_type = other DNA
actgtatactgtattttatc

SEQ ID NO: 295626 - DNA, 20 bp, synthetic construct
  source 1..20: mol_type = other DNA
tactgtatactgtattttat

SEQ ID NO: 295627 - DNA, 20 bp, synthetic construct
  source 1..20: mol_type = other DNA
ttactgtatactgtatttta

SEQ ID NO: 295628 - DNA, 20 bp, synthetic construct
  source 1..20: mol_type = other DNA
attactgtatactgtatttt

SEQ ID NO: 295629 - DNA, 20 bp, synthetic construct
  source 1..20: mol_type = other DNA
tattactgtatactgtattt

SEQ ID NO: 295630 - DNA, 20 bp, synthetic construct
  source 1..20: mol_type = other DNA
ctattactgtatactgtatt

SEQ ID NO: 295631 - DNA, 20 bp, synthetic construct
  source 1..20: mol_type = other DNA
tctattactgtatactgtat

SEQ ID NO: 295632 - DNA, 20 bp, synthetic construct
  source 1..20: mol_type = other DNA
ctctattactgtatactgta

SEQ ID NO: 295633 - DNA, 20 bp, synthetic construct
  source 1..20: mol_type = other DNA
tctctattactgtatactgt

SEQ ID NO: 295634 - DNA, 20 bp, synthetic construct
  source 1..20: mol_type = other DNA
ttctctattactgtatactg

SEQ ID NO: 295635 - DNA, 20 bp, synthetic construct
  source 1..20: mol_type = other DNA
gttctctattactgtatact

SEQ ID NO: 295636 - DNA, 20 bp, synthetic construct
  source 1..20: mol_type = other DNA
tgttctctattactgtatac

SEQ ID NO: 295637 - DNA, 20 bp, synthetic construct
  source 1..20: mol_type = other DNA
ttgttctctattactgtata

SEQ ID NO: 295638 - DNA, 20 bp, synthetic construct
  source 1..20: mol_type = other DNA
attgttctctattactgtat

SEQ ID NO: 295639 - DNA, 20 bp, synthetic construct
  source 1..20: mol_type = other DNA
gattgttctctattactgta

SEQ ID NO: 295640 - DNA, 20 bp, synthetic construct
  source 1..20: mol_type = other DNA
ggattgttctctattactgt

SEQ ID NO: 295641 - DNA, 20 bp, synthetic construct
  source 1..20: mol_type = other DNA
aggattgttctctattactg

SEQ ID NO: 295642 - DNA, 20 bp, synthetic construct
  source 1..20: mol_type = other DNA
aaggattgttctctattact

SEQ ID NO: 295643 - DNA, 20 bp, synthetic construct
  source 1..20: mol_type = other DNA
aaaggattgttctctattac

SEQ ID NO: 295644 - DNA, 20 bp, synthetic construct
  source 1..20: mol_type = other DNA
aaaaggattgttctctatta

SEQ ID NO: 295645 - DNA, 20 bp, synthetic construct
  source 1..20: mol_type = other DNA
aaaaaggattgttctctatt

SEQ ID NO: 295646 - DNA, 20 bp, synthetic construct
  source 1..20: mol_type = other DNA
aaaaaaggattgttctctat

SEQ ID NO: 295647 - DNA, 20 bp, synthetic construct
  source 1..20: mol_type = other DNA
gaaaaaaggattgttctcta

SEQ ID NO: 295648 - DNA, 20 bp, synthetic construct
  source 1..20: mol_type = other DNA
tgaaaaaaggattgttctct

SEQ ID NO: 295649 - DNA, 20 bp, synthetic construct
  source 1..20: mol_type = other DNA
ttgaaaaaaggattgttctc

SEQ ID NO: 295650 - DNA, 20 bp, synthetic construct
  source 1..20: mol_type = other DNA
tttgaaaaaaggattgttct

SEQ ID NO: 295651 - DNA, 20 bp, synthetic construct
  source 1..20: mol_type = other DNA
ctttgaaaaaaggattgttc

SEQ ID NO: 295652 - DNA, 20 bp, synthetic construct
  source 1..20: mol_type = other DNA
actttgaaaaaaggattgtt

SEQ ID NO: 295653 - DNA, 20 bp, synthetic construct
  source 1..20: mol_type = other DNA
tactttgaaaaaaggattgt

SEQ ID NO: 295654 - DNA, 20 bp, synthetic construct
  source 1..20: mol_type = other DNA
ctactttgaaaaaaggattg

SEQ ID NO: 295655 - DNA, 20 bp, synthetic construct
  source 1..20: mol_type = other DNA
actactttgaaaaaaggatt

SEQ ID NO: 295656 - DNA, 20 bp, synthetic construct
  source 1..20: mol_type = other DNA
cactactttgaaaaaaggat

SEQ ID NO: 295657 - DNA, 20 bp, synthetic construct
  source 1..20: mol_type = other DNA
tcactactttgaaaaaagga

SEQ ID NO: 295658 - DNA, 20 bp, synthetic construct
  source 1..20: mol_type = other DNA
gtcactactttgaaaaaagg

SEQ ID NO: 295659 - DNA, 20 bp, synthetic construct
  source 1..20: mol_type = other DNA
ggtcactactttgaaaaaag

SEQ ID NO: 295660 - DNA, 20 bp, synthetic construct
  source 1..20: mol_type = other DNA
gggtcactactttgaaaaaa

SEQ ID NO: 295661 - DNA, 20 bp, synthetic construct
  source 1..20: mol_type = other DNA
ggggtcactactttgaaaaa

SEQ ID NO: 295662 - DNA, 20 bp, synthetic construct
  source 1..20: mol_type = other DNA
tggggtcactactttgaaaa

SEQ ID NO: 295663 - DNA, 20 bp, synthetic construct
  source 1..20: mol_type = other DNA
ttggggtcactactttgaaa

SEQ ID NO: 295664 - DNA, 20 bp, synthetic construct
  source 1..20: mol_type = other DNA
tttggggtcactactttgaa

SEQ ID NO: 295665 - DNA, 20 bp, synthetic construct
  source 1..20: mol_type = other DNA
atttggggtcactactttga

SEQ ID NO: 295666 - DNA, 20 bp, synthetic construct
  source 1..20: mol_type = other DNA
catttggggtcactactttg

SEQ ID NO: 295667 - DNA, 20 bp, synthetic construct
  source 1..20: mol_type = other DNA
tcatttggggtcactacttt

SEQ ID NO: 295668 - DNA, 20 bp, synthetic construct
  source 1..20: mol_type = other DNA
ttcatttggggtcactactt

SEQ ID NO: 295669 - DNA, 20 bp, synthetic construct
  source 1..20: mol_type = other DNA
gttcatttggggtcactact

SEQ ID NO: 295670 - DNA, 20 bp, synthetic construct
  source 1..20: mol_type = other DNA
tgttcatttggggtcactac

SEQ ID NO: 295671 - DNA, 20 bp, synthetic construct
  source 1..20: mol_type = other DNA
ttgttcatttggggtcacta

SEQ ID NO: 295672 - DNA, 20 bp, synthetic construct
  source 1..20: mol_type = other DNA
tttgttcatttggggtcact

SEQ ID NO: 295673 - DNA, 20 bp, synthetic construct
  source 1..20: mol_type = other DNA
ttttgttcatttggggtcac

SEQ ID NO: 295674 - DNA, 20 bp, synthetic construct
  source 1..20: mol_type = other DNA
attttgttcatttggggtca

SEQ ID NO: 295675 - DNA, 20 bp, synthetic construct
  source 1..20: mol_type = other DNA
tattttgttcatttggggtc

SEQ ID NO: 295676 - DNA, 20 bp, synthetic construct
  source 1..20: mol_type = other DNA
atattttgttcatttggggt

SEQ ID NO: 295677 - DNA, 20 bp, synthetic construct
  source 1..20: mol_type = other DNA
catattttgttcatttgggg

SEQ ID NO: 295678 - DNA, 20 bp, synthetic construct
  source 1..20: mol_type = other DNA
gcatattttgttcatttggg

SEQ ID NO: 295679 - DNA, 20 bp, synthetic construct
  source 1..20: mol_type = other DNA
tgcatattttgttcatttgg

SEQ ID NO: 295680 - DNA, 20 bp, synthetic construct
  source 1..20: mol_type = other DNA
atgcatattttgttcatttg

SEQ ID NO: 295681 - DNA, 20 bp, synthetic construct
  source 1..20: mol_type = other DNA
gatgcatattttgttcattt

SEQ ID NO: 295682 - DNA, 20 bp, synthetic construct
  source 1..20: mol_type = other DNA
agatgcatattttgttcatt

SEQ ID NO: 295683 - DNA, 20 bp, synthetic construct
  source 1..20: mol_type = other DNA
tagatgcatattttgttcat

SEQ ID NO: 295684 - DNA, 20 bp, synthetic construct
  source 1..20: mol_type = other DNA
ctagatgcatattttgttca

SEQ ID NO: 295685 - DNA, 20 bp, synthetic construct
  source 1..20: mol_type = other DNA
gctagatgcatattttgttc

SEQ ID NO: 295686 - DNA, 20 bp, synthetic construct
  source 1..20: mol_type = other DNA
agctagatgcatattttgtt

SEQ ID NO: 295687 - DNA, 20 bp, synthetic construct
  source 1..20: mol_type = other DNA
aagctagatgcatattttgt

SEQ ID NO: 295688 - DNA, 20 bp, synthetic construct
  source 1..20: mol_type = other DNA
taagctagatgcatattttg

SEQ ID NO: 295689 - DNA, 20 bp, synthetic construct
  source 1..20: mol_type = other DNA
ttaagctagatgcatatttt

SEQ ID NO: 295690 - DNA, 20 bp, synthetic construct
  source 1..20: mol_type = other DNA
tttaagctagatgcatattt

SEQ ID NO: 295691 - DNA, 20 bp, synthetic construct
  source 1..20: mol_type = other DNA
atttaagctagatgcatatt

SEQ ID NO: 295692 - DNA, 20 bp, synthetic construct
  source 1..20: mol_type = other DNA
catttaagctagatgcatat

SEQ ID NO: 295693 - DNA, 20 bp, synthetic construct
  source 1..20: mol_type = other DNA
gcatttaagctagatgcata

SEQ ID NO: 295694 - DNA, 20 bp, synthetic construct
  source 1..20: mol_type = other DNA
cgcatttaagctagatgcat

SEQ ID NO: 295695 - DNA, 20 bp, synthetic construct
  source 1..20: mol_type = other DNA
tcgcatttaagctagatgca

SEQ ID NO: 295696 - DNA, 20 bp, synthetic construct
  source 1..20: mol_type = other DNA
ttcgcatttaagctagatgc

SEQ ID NO: 295697 - DNA, 20 bp, synthetic construct
  source 1..20: mol_type = other DNA
gttcgcatttaagctagatg

SEQ ID NO: 295698 - DNA, 20 bp, synthetic construct
  source 1..20: mol_type = other DNA
ggttcgcatttaagctagat

SEQ ID NO: 295699 - DNA, 20 bp, synthetic construct
  source 1..20: mol_type = other DNA
aggttcgcatttaagctaga

SEQ ID NO: 295700 - DNA, 20 bp, synthetic construct
  source 1..20: mol_type = other DNA
caggttcgcatttaagctag

SEQ ID NO: 295701 - DNA, 20 bp, synthetic construct
  source 1..20: mol_type = other DNA
ccaggttcgcatttaagcta

SEQ ID NO: 295702 - DNA, 20 bp, synthetic construct
  source 1..20: mol_type = other DNA
accaggttcgcatttaagct

SEQ ID NO: 295703 - DNA, 20 bp, synthetic construct
  source 1..20: mol_type = other DNA
aaccaggttcgcatttaagc

SEQ ID NO: 295704 - DNA, 20 bp, synthetic construct
  source 1..20: mol_type = other DNA
aaaccaggttcgcatttaag

SEQ ID NO: 295705 - DNA, 20 bp, synthetic construct
  source 1..20: mol_type = other DNA
aaaaccaggttcgcatttaa

SEQ ID NO: 295706 - DNA, 20 bp, synthetic construct
  source 1..20: mol_type = other DNA
gaaaaccaggttcgcattta

SEQ ID NO: 295707 - DNA, 20 bp, synthetic construct
  source 1..20: mol_type = other DNA
agaaaaccaggttcgcattt

SEQ ID NO: 295708 - DNA, 20 bp, synthetic construct
  source 1..20: mol_type = other DNA
gagaaaaccaggttcgcatt

SEQ ID NO: 295709 - DNA, 20 bp, synthetic construct
  source 1..20: mol_type = other DNA
agagaaaaccaggttcgcat

SEQ ID NO: 295710 - DNA, 20 bp, synthetic construct
  source 1..20: mol_type = other DNA
tagagaaaaccaggttcgca

SEQ ID NO: 295711 - DNA, 20 bp, synthetic construct
  source 1..20: mol_type = other DNA
gtagagaaaaccaggttcgc

SEQ ID NO: 295712 - DNA, 20 bp, synthetic construct
  source 1..20: mol_type = other DNA
cgtagagaaaaccaggttcg

SEQ ID NO: 295713 - DNA, 20 bp, synthetic construct
  source 1..20: mol_type = other DNA
gcgtagagaaaaccaggttc

SEQ ID NO: 295714 - DNA, 20 bp, synthetic construct
  source 1..20: mol_type = other DNA
ggcgtagagaaaaccaggtt

SEQ ID NO: 295715 - DNA, 20 bp, synthetic construct
  source 1..20: mol_type = other DNA
gggcgtagagaaaaccaggt

SEQ ID NO: 295716 - DNA, 20 bp, synthetic construct
  source 1..20: mol_type = other DNA
tgggcgtagagaaaaccagg

SEQ ID NO: 295717 - DNA, 20 bp, synthetic construct
  source 1..20: mol_type = other DNA
atgggcgtagagaaaaccag

SEQ ID NO: 295718 - DNA, 20 bp, synthetic construct
  source 1..20: mol_type = other DNA
aatgggcgtagagaaaacca

SEQ ID NO: 295719 - DNA, 20 bp, synthetic construct
  source 1..20: mol_type = other DNA
gaatgggcgtagagaaaacc

SEQ ID NO: 295720 - DNA, 20 bp, synthetic construct
  source 1..20: mol_type = other DNA
tgaatgggcgtagagaaaac

SEQ ID NO: 295721 - DNA, 20 bp, synthetic construct
  source 1..20: mol_type = other DNA
ttgaatgggcgtagagaaaa

SEQ ID NO: 295722 - DNA, 20 bp, synthetic construct
  source 1..20: mol_type = other DNA
cttgaatgggcgtagagaaa

SEQ ID NO: 295723 - DNA, 20 bp, synthetic construct
  source 1..20: mol_type = other DNA
gcttgaatgggcgtagagaa

SEQ ID NO: 295724 - DNA, 20 bp, synthetic construct
  source 1..20: mol_type = other DNA
ggcttgaatgggcgtagaga

SEQ ID NO: 295725 - DNA, 20 bp, synthetic construct
  source 1..20: mol_type = other DNA
gggcttgaatgggcgtagag

SEQ ID NO: 295726 - DNA, 20 bp, synthetic construct
  source 1..20: mol_type = other DNA
ggggcttgaatgggcgtaga

SEQ ID NO: 295727 - DNA, 20 bp, synthetic construct
  source 1..20: mol_type = other DNA
aggggcttgaatgggcgtag

SEQ ID NO: 295728 - DNA, 20 bp, synthetic construct
  source 1..20: mol_type = other DNA
caggggcttgaatgggcgta

SEQ ID NO: 295729 - DNA, 20 bp, synthetic construct
  source 1..20: mol_type = other DNA
gcaggggcttgaatgggcgt

SEQ ID NO: 295730 - DNA, 20 bp, synthetic construct
  source 1..20: mol_type = other DNA
tgcaggggcttgaatgggcg

SEQ ID NO: 295731 - DNA, 20 bp, synthetic construct
  source 1..20: mol_type = other DNA
ttgcaggggcttgaatgggc

SEQ ID NO: 295732 - DNA, 20 bp, synthetic construct
  source 1..20: mol_type = other DNA
attgcaggggcttgaatggg

SEQ ID NO: 295733 - DNA, 20 bp, synthetic construct
  source 1..20: mol_type = other DNA
tattgcaggggcttgaatgg

SEQ ID NO: 295734 - DNA, 20 bp, synthetic construct
  source 1..20: mol_type = other DNA
ctattgcaggggcttgaatg

SEQ ID NO: 295735 - DNA, 20 bp, synthetic construct
  source 1..20: mol_type = other DNA
cctattgcaggggcttgaat

SEQ ID NO: 295736 - DNA, 20 bp, synthetic construct
  source 1..20: mol_type = other DNA
ccctattgcaggggcttgaa

SEQ ID NO: 295737 - DNA, 20 bp, synthetic construct
  source 1..20: mol_type = other DNA
cccctattgcaggggcttga

SEQ ID NO: 295738 - DNA, 20 bp, synthetic construct
  source 1..20: mol_type = other DNA
gcccctattgcaggggcttg

SEQ ID NO: 295739 - DNA, 20 bp, synthetic construct
  source 1..20: mol_type = other DNA
ggcccctattgcaggggctt

SEQ ID NO: 295740 - DNA, 20 bp, synthetic construct
  source 1..20: mol_type = other DNA
gggcccctattgcaggggct

SEQ ID NO: 295741 - DNA, 20 bp, synthetic construct
  source 1..20: mol_type = other DNA
agggcccctattgcaggggc

SEQ ID NO: 295742 - DNA, 20 bp, synthetic construct
  source 1..20: mol_type = other DNA
aagggcccctattgcagggg

SEQ ID NO: 295743 - DNA, 20 bp, synthetic construct
  source 1..20: mol_type = other DNA
gaagggcccctattgcaggg

SEQ ID NO: 295744 - DNA, 20 bp, synthetic construct
  source 1..20: mol_type = other DNA
tgaagggcccctattgcagg

SEQ ID NO: 295745 - DNA, 20 bp, synthetic construct
  source 1..20: mol_type = other DNA
gtgaagggcccctattgcag

SEQ ID NO: 295746 - DNA, 20 bp, synthetic construct
  source 1..20: mol_type = other DNA
ggtgaagggcccctattgca

SEQ ID NO: 295747 - DNA, 20 bp, synthetic construct
  source 1..20: mol_type = other DNA
gggtgaagggcccctattgc

SEQ ID NO: 295748 - DNA, 20 bp, synthetic construct
  source 1..20: mol_type = other DNA
ggggtgaagggcccctattg

SEQ ID NO: 295749 - DNA, 20 bp, synthetic construct
  source 1..20: mol_type = other DNA
cggggtgaagggcccctatt

SEQ ID NO: 295750 - DNA, 20 bp, synthetic construct
  source 1..20: mol_type = other DNA
gcggggtgaagggcccctat

SEQ ID NO: 295751 - DNA, 20 bp, synthetic construct
  source 1..20: mol_type = other DNA
tgcggggtgaagggccccta

SEQ ID NO: 295752 - DNA, 20 bp, synthetic construct
  source 1..20: mol_type = other DNA
atgcggggtgaagggcccct

SEQ ID NO: 295753 - DNA, 20 bp, synthetic construct
  source 1..20: mol_type = other DNA
gatgcggggtgaagggcccc

SEQ ID NO: 295754 - DNA, 20 bp, synthetic construct
  source 1..20: mol_type = other DNA
ggatgcggggtgaagggccc

SEQ ID NO: 295755 - DNA, 20 bp, synthetic construct
  source 1..20: mol_type = other DNA
tggatgcggggtgaagggcc

SEQ ID NO: 295756 - DNA, 20 bp, synthetic construct
  source 1..20: mol_type = other DNA
atggatgcggggtgaagggc

SEQ ID NO: 295757 - DNA, 20 bp, synthetic construct
  source 1..20: mol_type = other DNA
catggatgcggggtgaaggg

SEQ ID NO: 295758 - DNA, 20 bp, synthetic construct
  source 1..20: mol_type = other DNA
ccatggatgcggggtgaagg

SEQ ID NO: 295759 - DNA, 20 bp, synthetic construct
  source 1..20: mol_type = other DNA
tccatggatgcggggtgaag

SEQ ID NO: 295760 - DNA, 20 bp, synthetic construct
  source 1..20: mol_type = other DNA
gtccatggatgcggggtgaa

SEQ ID NO: 295761 - DNA, 20 bp, synthetic construct
  source 1..20: mol_type = other DNA
agtccatggatgcggggtga

SEQ ID NO: 295762 - DNA, 20 bp, synthetic construct
  source 1..20: mol_type = other DNA
gagtccatggatgcggggtg

SEQ ID NO: 295763 - DNA, 20 bp, synthetic construct
  source 1..20: mol_type = other DNA
ggagtccatggatgcggggt

SEQ ID NO: 295764 - DNA, 20 bp, synthetic construct
  source 1..20: mol_type = other DNA
aggagtccatggatgcgggg

SEQ ID NO: 295765 - DNA, 20 bp, synthetic construct
  source 1..20: mol_type = other DNA
taggagtccatggatgcggg

SEQ ID NO: 295766 - DNA, 20 bp, synthetic construct
  source 1..20: mol_type = other DNA
ttaggagtccatggatgcgg

SEQ ID NO: 295767 - DNA, 20 bp, synthetic construct
  source 1..20: mol_type = other DNA
tttaggagtccatggatgcg

SEQ ID NO: 295768 - DNA, 20 bp, synthetic construct
  source 1..20: mol_type = other DNA
ttttaggagtccatggatgc

SEQ ID NO: 295769 - DNA, 20 bp, synthetic construct
  source 1..20: mol_type = other DNA
attttaggagtccatggatg

SEQ ID NO: 295770 - DNA, 20 bp, synthetic construct
  source 1..20: mol_type = other DNA
aattttaggagtccatggat

SEQ ID NO: 295771 - DNA, 20 bp, synthetic construct
  source 1..20: mol_type = other DNA
taattttaggagtccatgga

SEQ ID NO: 295772 - DNA, 20 bp, synthetic construct
  source 1..20: mol_type = other DNA
ataattttaggagtccatgg

SEQ ID NO: 295773 - DNA, 20 bp, synthetic construct
  source 1..20: mol_type = other DNA
tataattttaggagtccatg

SEQ ID NO: 295774 - DNA, 20 bp, synthetic construct
  source 1..20: mol_type = other DNA
atataattttaggagtccat

SEQ ID NO: 295775 - DNA, 20 bp, synthetic construct
  source 1..20: mol_type = other DNA
catataattttaggagtcca

SEQ ID NO: 295776 - DNA, 20 bp, synthetic construct
  source 1..20: mol_type = other DNA
ccatataattttaggagtcc

SEQ ID NO: 295777 - DNA, 20 bp, synthetic construct
  source 1..20: mol_type = other DNA
tccatataattttaggagtc

SEQ ID NO: 295778 - DNA, 20 bp, synthetic construct
  source 1..20: mol_type = other DNA
ttccatataattttaggagt

SEQ ID NO: 295779 - DNA, 20 bp, synthetic construct
  source 1..20: mol_type = other DNA
tttccatataattttaggag

SEQ ID NO: 295780 - DNA, 20 bp, synthetic construct
  source 1..20: mol_type = other DNA
ttttccatataattttagga

SEQ ID NO: 295781 - DNA, 20 bp, synthetic construct
  source 1..20: mol_type = other DNA
attttccatataattttagg

SEQ ID NO: 295782 - DNA, 20 bp, synthetic construct
  source 1..20: mol_type = other DNA
cattttccatataattttag

SEQ ID NO: 295783 - DNA, 20 bp, synthetic construct
  source 1..20: mol_type = other DNA
ccattttccatataatttta

SEQ ID NO: 295784 - DNA, 20 bp, synthetic construct
  source 1..20: mol_type = other DNA
gccattttccatataatttt

SEQ ID NO: 295785 - DNA, 20 bp, synthetic construct
  source 1..20: mol_type = other DNA
agccattttccatataattt

SEQ ID NO: 295786 - DNA, 20 bp, synthetic construct
  source 1..20: mol_type = other DNA
cagccattttccatataatt

SEQ ID NO: 295787 - DNA, 20 bp, synthetic construct
  source 1..20: mol_type = other DNA
acagccattttccatataat

SEQ ID NO: 295788 - DNA, 20 bp, synthetic construct
  source 1..20: mol_type = other DNA
cacagccattttccatataa

SEQ ID NO: 295789 - DNA, 20 bp, synthetic construct
  source 1..20: mol_type = other DNA
acacagccattttccatata

SEQ ID NO: 295790 - DNA, 20 bp, synthetic construct
  source 1..20: mol_type = other DNA
cacacagccattttccatat

SEQ ID NO: 295791 - DNA, 20 bp, synthetic construct
  source 1..20: mol_type = other DNA
acacacagccattttccata

SEQ ID NO: 295792 - DNA, 20 bp, synthetic construct
  source 1..20: mol_type = other DNA
cacacacagccattttccat

SEQ ID NO: 295793 - DNA, 20 bp, synthetic construct
  source 1..20: mol_type = other DNA
tcacacacagccattttcca

SEQ ID NO: 295794 - DNA, 20 bp, synthetic construct
  source 1..20: mol_type = other DNA
ctcacacacagccattttcc

SEQ ID NO: 295795 - DNA, 20 bp, synthetic construct
  source 1..20: mol_type = other DNA
actcacacacagccattttc

SEQ ID NO: 295796 - DNA, 20 bp, synthetic construct
  source 1..20: mol_type = other DNA
cactcacacacagccatttt

SEQ ID NO: 295797 - DNA, 20 bp, synthetic construct
  source 1..20: mol_type = other DNA
acactcacacacagccattt

SEQ ID NO: 295798 - DNA, 20 bp, synthetic construct
  source 1..20: mol_type = other DNA
cacactcacacacagccatt

SEQ ID NO: 295799 - DNA, 20 bp, synthetic construct
  source 1..20: mol_type = other DNA
ccacactcacacacagccat

SEQ ID NO: 295800 - DNA, 20 bp, synthetic construct
  source 1..20: mol_type = other DNA
tccacactcacacacagcca

SEQ ID NO: 295801 - DNA, 20 bp, synthetic construct
  source 1..20: mol_type = other DNA
atccacactcacacacagcc

SEQ ID NO: 295802 - DNA, 20 bp, synthetic construct
  source 1..20: mol_type = other DNA
catccacactcacacacagc

SEQ ID NO: 295803 - DNA, 20 bp, synthetic construct
  source 1..20: mol_type = other DNA
ccatccacactcacacacag

SEQ ID NO: 295804 - DNA, 20 bp, synthetic construct
  source 1..20: mol_type = other DNA
tccatccacactcacacaca

SEQ ID NO: 295805 - DNA, 20 bp, synthetic construct
  source 1..20: mol_type = other DNA
gtccatccacactcacacac

SEQ ID NO: 295806 - DNA, 20 bp, synthetic construct
  source 1..20: mol_type = other DNA
tgtccatccacactcacaca

SEQ ID NO: 295807 - DNA, 20 bp, synthetic construct
  source 1..20: mol_type = other DNA
atgtccatccacactcacac

SEQ ID NO: 295808 - DNA, 20 bp, synthetic construct
  source 1..20: mol_type = other DNA
catgtccatccacactcaca

SEQ ID NO: 295809 - DNA, 20 bp, synthetic construct
  source 1..20: mol_type = other DNA
acatgtccatccacactcac

SEQ ID NO: 295810 - DNA, 20 bp, synthetic construct
  source 1..20: mol_type = other DNA
cacatgtccatccacactca

SEQ ID NO: 295811 - DNA, 20 bp, synthetic construct
  source 1..20: mol_type = other DNA
gcacatgtccatccacactc

SEQ ID NO: 295812 - DNA, 20 bp, synthetic construct
  source 1..20: mol_type = other DNA
tgcacatgtccatccacact

SEQ ID NO: 295813 - DNA, 20 bp, synthetic construct
  source 1..20: mol_type = other DNA
gtgcacatgtccatccacac

SEQ ID NO: 295814 - DNA, 20 bp, synthetic construct
  source 1..20: mol_type = other DNA
tgtgcacatgtccatccaca

SEQ ID NO: 295815 - DNA, 20 bp, synthetic construct
  source 1..20: mol_type = other DNA
gtgtgcacatgtccatccac

SEQ ID NO: 295816 - DNA, 20 bp, synthetic construct
  source 1..20: mol_type = other DNA
tgtgtgcacatgtccatcca

SEQ ID NO: 295817 - DNA, 20 bp, synthetic construct
  source 1..20: mol_type = other DNA
atgtgtgcacatgtccatcc

SEQ ID NO: 295818 - DNA, 20 bp, synthetic construct
  source 1..20: mol_type = other DNA
tatgtgtgcacatgtccatc

SEQ ID NO: 295819 - DNA, 20 bp, synthetic construct
  source 1..20: mol_type = other DNA
atatgtgtgcacatgtccat

SEQ ID NO: 295820 - DNA, 20 bp, synthetic construct
  source 1..20: mol_type = other DNA
aatatgtgtgcacatgtcca

SEQ ID NO: 295821 - DNA, 20 bp, synthetic construct
  source 1..20: mol_type = other DNA
aaatatgtgtgcacatgtcc

SEQ ID NO: 295822 - DNA, 20 bp, synthetic construct
  source 1..20: mol_type = other DNA
aaaatatgtgtgcacatgtc

SEQ ID NO: 295823 - DNA, 20 bp, synthetic construct
  source 1..20: mol_type = other DNA
aaaaatatgtgtgcacatgt

SEQ ID NO: 295824 - DNA, 20 bp, synthetic construct
  source 1..20: mol_type = other DNA
caaaaatatgtgtgcacatg

SEQ ID NO: 295825 - DNA, 20 bp, synthetic construct
  source 1..20: mol_type = other DNA
ccaaaaatatgtgtgcacat

SEQ ID NO: 295826 - DNA, 20 bp, synthetic construct
  source 1..20: mol_type = other DNA
gccaaaaatatgtgtgcaca

SEQ ID NO: 295827 - DNA, 20 bp, synthetic construct
  source 1..20: mol_type = other DNA
agccaaaaatatgtgtgcac

SEQ ID NO: 295828 - DNA, 20 bp, synthetic construct
  source 1..20: mol_type = other DNA
aagccaaaaatatgtgtgca

SEQ ID NO: 295829 - DNA, 20 bp, synthetic construct
  source 1..20: mol_type = other DNA
aaagccaaaaatatgtgtgc

SEQ ID NO: 295830 - DNA, 20 bp, synthetic construct
  source 1..20: mol_type = other DNA
taaagccaaaaatatgtgtg

SEQ ID NO: 295831 - DNA, 20 bp, synthetic construct
  source 1..20: mol_type = other DNA
gtaaagccaaaaatatgtgt

SEQ ID NO: 295832 - DNA, 20 bp, synthetic construct
  source 1..20: mol_type = other DNA
ggtaaagccaaaaatatgtg

SEQ ID NO: 295833 - DNA, 20 bp, synthetic construct
  source 1..20: mol_type = other DNA
tggtaaagccaaaaatatgt

SEQ ID NO: 295834 - DNA, 20 bp, synthetic construct
  source 1..20: mol_type = other DNA
ctggtaaagccaaaaatatg

SEQ ID NO: 295835 - DNA, 20 bp, synthetic construct
  source 1..20: mol_type = other DNA
tctggtaaagccaaaaatat

SEQ ID NO: 295836 - DNA, 20 bp, synthetic construct
  source 1..20: mol_type = other DNA
atctggtaaagccaaaaata

SEQ ID NO: 295837 - DNA, 20 bp, synthetic construct
  source 1..20: mol_type = other DNA
catctggtaaagccaaaaat

SEQ ID NO: 295838 - DNA, 20 bp, synthetic construct
  source 1..20: mol_type = other DNA
gcatctggtaaagccaaaaa

SEQ ID NO: 295839 - DNA, 20 bp, synthetic construct
  source 1..20: mol_type = other DNA
agcatctggtaaagccaaaa

SEQ ID NO: 295840 - DNA, 20 bp, synthetic construct
  source 1..20: mol_type = other DNA
gagcatctggtaaagccaaa

SEQ ID NO: 295841 - DNA, 20 bp, synthetic construct
  source 1..20: mol_type = other DNA
tgagcatctggtaaagccaa

SEQ ID NO: 295842 - DNA, 20 bp, synthetic construct
  source 1..20: mol_type = other DNA
ttgagcatctggtaaagcca

SEQ ID NO: 295843 - DNA, 20 bp, synthetic construct
  source 1..20: mol_type = other DNA
tttgagcatctggtaaagcc

SEQ ID NO: 295844 - DNA, 20 bp, synthetic construct
  source 1..20: mol_type = other DNA
ctttgagcatctggtaaagc

SEQ ID NO: 295845 - DNA, 20 bp, synthetic construct
  source 1..20: mol_type = other DNA
tctttgagcatctggtaaag

SEQ ID NO: 295846 - DNA, 20 bp, synthetic construct
  source 1..20: mol_type = other DNA
ctctttgagcatctggtaaa

SEQ ID NO: 295847 - DNA, 20 bp, synthetic construct
  source 1..20: mol_type = other DNA
gctctttgagcatctggtaa

SEQ ID NO: 295848 - DNA, 20 bp, synthetic construct
  source 1..20: mol_type = other DNA
ggctctttgagcatctggta

SEQ ID NO: 295849 - DNA, 20 bp, synthetic construct
  source 1..20: mol_type = other DNA
aggctctttgagcatctggt

SEQ ID NO: 295850 - DNA, 20 bp, synthetic construct
  source 1..20: mol_type = other DNA
taggctctttgagcatctgg

SEQ ID NO: 295851 - DNA, 20 bp, synthetic construct
  source 1..20: mol_type = other DNA
ctaggctctttgagcatctg

SEQ ID NO: 295852 - DNA, 20 bp, synthetic construct
  source 1..20: mol_type = other DNA
cctaggctctttgagcatct

SEQ ID NO: 295853 - DNA, 20 bp, synthetic construct
  source 1..20: mol_type = other DNA
tcctaggctctttgagcatc

SEQ ID NO: 295854 - DNA, 20 bp, synthetic construct
  source 1..20: mol_type = other DNA
gtcctaggctctttgagcat

SEQ ID NO: 295855 - DNA, 20 bp, synthetic construct
  source 1..20: mol_type = other DNA
ggtcctaggctctttgagca

SEQ ID NO: 295856 - DNA, 20 bp, synthetic construct
  source 1..20: mol_type = other DNA
gggtcctaggctctttgagc

SEQ ID NO: 295857 - DNA, 20 bp, synthetic construct
  source 1..20: mol_type = other DNA
tgggtcctaggctctttgag

SEQ ID NO: 295858 - DNA, 20 bp, synthetic construct
  source 1..20: mol_type = other DNA
ttgggtcctaggctctttga

SEQ ID NO: 295859 - DNA, 20 bp, synthetic construct
  source 1..20: mol_type = other DNA
tttgggtcctaggctctttg

SEQ ID NO: 295860 - DNA, 20 bp, synthetic construct
  source 1..20: mol_type = other DNA
ttttgggtcctaggctcttt

SEQ ID NO: 295861 - DNA, 20 bp, synthetic construct
  source 1..20: mol_type = other DNA
tttttgggtcctaggctctt

SEQ ID NO: 295862 - DNA, 20 bp, synthetic construct
  source 1..20: mol_type = other DNA
ctttttgggtcctaggctct

SEQ ID NO: 295863 - DNA, 20 bp, synthetic construct
  source 1..20: mol_type = other DNA
cctttttgggtcctaggctc

SEQ ID NO: 295864 - DNA, 20 bp, synthetic construct
  source 1..20: mol_type = other DNA
ccctttttgggtcctaggct

SEQ ID NO: 295865 - DNA, 20 bp, synthetic construct
  source 1..20: mol_type = other DNA
gccctttttgggtcctaggc

SEQ ID NO: 295866 - DNA, 20 bp, synthetic construct
  source 1..20: mol_type = other DNA
agccctttttgggtcctagg

SEQ ID NO: 295867 - DNA, 20 bp, synthetic construct
  source 1..20: mol_type = other DNA
cagccctttttgggtcctag

SEQ ID NO: 295868 - DNA, 20 bp, synthetic construct
  source 1..20: mol_type = other DNA
tcagccctttttgggtccta

SEQ ID NO: 295869 - DNA, 20 bp, synthetic construct
  source 1..20: mol_type = other DNA
ctcagccctttttgggtcct

SEQ ID NO: 295870 - DNA, 20 bp, synthetic construct
  source 1..20: mol_type = other DNA
tctcagccctttttgggtcc

SEQ ID NO: 295871 - DNA, 20 bp, synthetic construct
  source 1..20: mol_type = other DNA
ttctcagccctttttgggtc

SEQ ID NO: 295872 - DNA, 20 bp, synthetic construct
  source 1..20: mol_type = other DNA
attctcagccctttttgggt

SEQ ID NO: 295873 - DNA, 20 bp, synthetic construct
  source 1..20: mol_type = other DNA
cattctcagccctttttggg

SEQ ID NO: 295874 - DNA, 20 bp, synthetic construct
  source 1..20: mol_type = other DNA
tcattctcagccctttttgg

SEQ ID NO: 295875 - DNA, 20 bp, synthetic construct
  source 1..20: mol_type = other DNA
gtcattctcagccctttttg

SEQ ID NO: 295876 - DNA, 20 bp, synthetic construct
  source 1..20: mol_type = other DNA
ggtcattctcagcccttttt

SEQ ID NO: 295877 - DNA, 20 bp, synthetic construct
  source 1..20: mol_type = other DNA
cggtcattctcagccctttt

SEQ ID NO: 295878 - DNA, 20 bp, synthetic construct
  source 1..20: mol_type = other DNA
acggtcattctcagcccttt

SEQ ID NO: 295879 - DNA, 20 bp, synthetic construct
  source 1..20: mol_type = other DNA
cacggtcattctcagccctt

SEQ ID NO: 295880 - DNA, 20 bp, synthetic construct
  source 1..20: mol_type = other DNA
acacggtcattctcagccct

SEQ ID NO: 295881 - DNA, 20 bp, synthetic construct
  source 1..20: mol_type = other DNA
gacacggtcattctcagccc

SEQ ID NO: 295882 - DNA, 20 bp, synthetic construct
  source 1..20: mol_type = other DNA
cgacacggtcattctcagcc

SEQ ID NO: 295883 - DNA, 20 bp, synthetic construct
  source 1..20: mol_type = other DNA
ccgacacggtcattctcagc

SEQ ID NO: 295884 - DNA, 20 bp, synthetic construct
  source 1..20: mol_type = other DNA
gccgacacggtcattctcag

SEQ ID NO: 295885 - DNA, 20 bp, synthetic construct
  source 1..20: mol_type = other DNA
ggccgacacggtcattctca

SEQ ID NO: 295886 - DNA, 20 bp, synthetic construct
  source 1..20: mol_type = other DNA
tggccgacacggtcattctc

SEQ ID NO: 295887 - DNA, 20 bp, synthetic construct
  source 1..20: mol_type = other DNA
gtggccgacacggtcattct

SEQ ID NO: 295888 - DNA, 20 bp, synthetic construct
  source 1..20: mol_type = other DNA
agtggccgacacggtcattc

SEQ ID NO: 295889 - DNA, 20 bp, synthetic construct
  source 1..20: mol_type = other DNA
aagtggccgacacggtcatt

SEQ ID NO: 295890 - DNA, 20 bp, synthetic construct
  source 1..20: mol_type = other DNA
gaagtggccgacacggtcat

SEQ ID NO: 295891 - DNA, 20 bp, synthetic construct
  source 1..20: mol_type = other DNA
tgaagtggccgacacggtca

SEQ ID NO: 295892 - DNA, 20 bp, synthetic construct
  source 1..20: mol_type = other DNA
ctgaagtggccgacacggtc

SEQ ID NO: 295893 - DNA, 20 bp, synthetic construct
  source 1..20: mol_type = other DNA
cctgaagtggccgacacggt

SEQ ID NO: 295894 - DNA, 20 bp, synthetic construct
  source 1..20: mol_type = other DNA
ccctgaagtggccgacacgg

SEQ ID NO: 295895 - DNA, 20 bp, synthetic construct
  source 1..20: mol_type = other DNA
accctgaagtggccgacacg

SEQ ID NO: 295896 - DNA, 20 bp, synthetic construct
  source 1..20: mol_type = other DNA
gaccctgaagtggccgacac

SEQ ID NO: 295897 - DNA, 20 bp, synthetic construct
  source 1..20: mol_type = other DNA
tgaccctgaagtggccgaca

SEQ ID NO: 295898 - DNA, 20 bp, synthetic construct
  source 1..20: mol_type = other DNA
atgaccctgaagtggccgac

SEQ ID NO: 295899 - DNA, 20 bp, synthetic construct
  source 1..20: mol_type = other DNA
gatgaccctgaagtggccga

SEQ ID NO: 295900 - DNA, 20 bp, synthetic construct
  source 1..20: mol_type = other DNA
tgatgaccctgaagtggccg

SEQ ID NO: 295901 - DNA, 20 bp, synthetic construct
  source 1..20: mol_type = other DNA
ctgatgaccctgaagtggcc

SEQ ID NO: 295902 - DNA, 20 bp, synthetic construct
  source 1..20: mol_type = other DNA
cctgatgaccctgaagtggc

SEQ ID NO: 295903 - DNA, 20 bp, synthetic construct
  source 1..20: mol_type = other DNA
tcctgatgaccctgaagtgg

SEQ ID NO: 295904 - DNA, 20 bp, synthetic construct
  source 1..20: mol_type = other DNA
ttcctgatgaccctgaagtg

SEQ ID NO: 295905 - DNA, 20 bp, synthetic construct
  source 1..20: mol_type = other DNA
attcctgatgaccctgaagt

SEQ ID NO: 295906 - DNA, 20 bp, synthetic construct
  source 1..20: mol_type = other DNA
aattcctgatgaccctgaag

SEQ ID NO: 295907 - DNA, 20 bp, synthetic construct
  source 1..20: mol_type = other DNA
caattcctgatgaccctgaa

SEQ ID NO: 295908 - DNA, 20 bp, synthetic construct
  source 1..20: mol_type = other DNA
gcaattcctgatgaccctga

SEQ ID NO: 295909 - DNA, 20 bp, synthetic construct
  source 1..20: mol_type = other DNA
agcaattcctgatgaccctg

SEQ ID NO: 295910 - DNA, 20 bp, synthetic construct
  source 1..20: mol_type = other DNA
cagcaattcctgatgaccct

SEQ ID NO: 295911 - DNA, 20 bp, synthetic construct
  source 1..20: mol_type = other DNA
acagcaattcctgatgaccc

SEQ ID NO: 295912 - DNA, 20 bp, synthetic construct
  source 1..20: mol_type = other DNA
cacagcaattcctgatgacc

SEQ ID NO: 295913 - DNA, 20 bp, synthetic construct
  source 1..20: mol_type = other DNA
gcacagcaattcctgatgac

SEQ ID NO: 295914 - DNA, 20 bp, synthetic construct
  source 1..20: mol_type = other DNA
tgcacagcaattcctgatga

SEQ ID NO: 295915 - DNA, 20 bp, synthetic construct
  source 1..20: mol_type = other DNA
gtgcacagcaattcctgatg

SEQ ID NO: 295916 - DNA, 20 bp, synthetic construct
  source 1..20: mol_type = other DNA
agtgcacagcaattcctgat

SEQ ID NO: 295917 - DNA, 20 bp, synthetic construct
  source 1..20: mol_type = other DNA
cagtgcacagcaattcctga

SEQ ID NO: 295918 - DNA, 20 bp, synthetic construct
  source 1..20: mol_type = other DNA
gcagtgcacagcaattcctg

SEQ ID NO: 295919 - DNA, 20 bp, synthetic construct
  source 1..20: mol_type = other DNA
agcagtgcacagcaattcct

SEQ ID NO: 295920 - DNA, 20 bp, synthetic construct
  source 1..20: mol_type = other DNA
gagcagtgcacagcaattcc

SEQ ID NO: 295921 - DNA, 20 bp, synthetic construct
  source 1..20: mol_type = other DNA
tgagcagtgcacagcaattc

SEQ ID NO: 295922 - DNA, 20 bp, synthetic construct
  source 1..20: mol_type = other DNA
gtgagcagtgcacagcaatt

SEQ ID NO: 295923 - DNA, 20 bp, synthetic construct
  source 1..20: mol_type = other DNA
agtgagcagtgcacagcaat

SEQ ID NO: 295924 - DNA, 20 bp, synthetic construct
  source 1..20: mol_type = other DNA
aagtgagcagtgcacagcaa

SEQ ID NO: 295925 - DNA, 20 bp, synthetic construct
  source 1..20: mol_type = other DNA
gaagtgagcagtgcacagca

SEQ ID NO: 295926 - DNA, 20 bp, synthetic construct
  source 1..20: mol_type = other DNA
agaagtgagcagtgcacagc

SEQ ID NO: 295927 - DNA, 20 bp, synthetic construct
  source 1..20: mol_type = other DNA
gagaagtgagcagtgcacag

SEQ ID NO: 295928 - DNA, 20 bp, synthetic construct
  source 1..20: mol_type = other DNA
ggagaagtgagcagtgcaca

SEQ ID NO: 295929 - DNA, 20 bp, synthetic construct
  source 1..20: mol_type = other DNA
tggagaagtgagcagtgcac

SEQ ID NO: 295930 - DNA, 20 bp, synthetic construct
  source 1..20: mol_type = other DNA
ctggagaagtgagcagtgca

SEQ ID NO: 295931 - DNA, 20 bp, synthetic construct
  source 1..20: mol_type = other DNA
actggagaagtgagcagtgc

SEQ ID NO: 295932 - DNA, 20 bp, synthetic construct
  source 1..20: mol_type = other DNA
cactggagaagtgagcagtg

SEQ ID NO: 295933 - DNA, 20 bp, synthetic construct
  source 1..20: mol_type = other DNA
tcactggagaagtgagcagt

SEQ ID NO: 295934 - DNA, 20 bp, synthetic construct
  source 1..20: mol_type = other DNA
ttcactggagaagtgagcag

SEQ ID NO: 295935 - DNA, 20 bp, synthetic construct
  source 1..20: mol_type = other DNA
gttcactggagaagtgagca

SEQ ID NO: 295936 - DNA, 20 bp, synthetic construct
  source 1..20: mol_type = other DNA
tgttcactggagaagtgagc

SEQ ID NO: 295937 - DNA, 20 bp, synthetic construct
  source 1..20: mol_type = other DNA
gtgttcactggagaagtgag

SEQ ID NO: 295938 - DNA, 20 bp, synthetic construct
  source 1..20: mol_type = other DNA
agtgttcactggagaagtga

SEQ ID NO: 295939 - DNA, 20 bp, synthetic construct
  source 1..20: mol_type = other DNA
aagtgttcactggagaagtg

SEQ ID NO: 295940 - DNA, 20 bp, synthetic construct
  source 1..20: mol_type = other DNA
aaagtgttcactggagaagt

SEQ ID NO: 295941 - DNA, 20 bp, synthetic construct
  source 1..20: mol_type = other DNA
gaaagtgttcactggagaag

SEQ ID NO: 295942 - DNA, 20 bp, synthetic construct
  source 1..20: mol_type = other DNA
agaaagtgttcactggagaa

SEQ ID NO: 295943 - DNA, 20 bp, synthetic construct
  source 1..20: mol_type = other DNA
cagaaagtgttcactggaga

SEQ ID NO: 295944 - DNA, 20 bp, synthetic construct
  source 1..20: mol_type = other DNA
gcagaaagtgttcactggag

SEQ ID NO: 295945 - DNA, 20 bp, synthetic construct
  source 1..20: mol_type = other DNA
agcagaaagtgttcactgga

SEQ ID NO: 295946 - DNA, 20 bp, synthetic construct
  source 1..20: mol_type = other DNA
aagcagaaagtgttcactgg

SEQ ID NO: 295947 - DNA, 20 bp, synthetic construct
  source 1..20: mol_type = other DNA
gaagcagaaagtgttcactg

SEQ ID NO: 295948 - DNA, 20 bp, synthetic construct
  source 1..20: mol_type = other DNA
agaagcagaaagtgttcact

SEQ ID NO: 295949 - DNA, 20 bp, synthetic construct
  source 1..20: mol_type = other DNA
cagaagcagaaagtgttcac

SEQ ID NO: 295950 - DNA, 20 bp, synthetic construct
  source 1..20: mol_type = other DNA
acagaagcagaaagtgttca

SEQ ID NO: 295951 - DNA, 20 bp, synthetic construct
  source 1..20: mol_type = other DNA
cacagaagcagaaagtgttc

SEQ ID NO: 295952 - DNA, 20 bp, synthetic construct
  source 1..20: mol_type = other DNA
acacagaagcagaaagtgtt

SEQ ID NO: 295953 - DNA, 20 bp, synthetic construct
  source 1..20: mol_type = other DNA
aacacagaagcagaaagtgt

SEQ ID NO: 295954 - DNA, 20 bp, synthetic construct
  source 1..20: mol_type = other DNA
aaacacagaagcagaaagtg

SEQ ID NO: 295955 - DNA, 20 bp, synthetic construct
  source 1..20: mol_type = other DNA
gaaacacagaagcagaaagt

SEQ ID NO: 295956 - DNA, 20 bp, synthetic construct
  source 1..20: mol_type = other DNA
ggaaacacagaagcagaaag

SEQ ID NO: 295957 - DNA, 20 bp, synthetic construct
  source 1..20: mol_type = other DNA
aggaaacacagaagcagaaa

SEQ ID NO: 295958 - DNA, 20 bp, synthetic construct
  source 1..20: mol_type = other DNA
caggaaacacagaagcagaa

SEQ ID NO: 295959 - DNA, 20 bp, synthetic construct
  source 1..20: mol_type = other DNA
ccaggaaacacagaagcaga

SEQ ID NO: 295960 - DNA, 20 bp, synthetic construct
  source 1..20: mol_type = other DNA
accaggaaacacagaagcag

SEQ ID NO: 295961 - DNA, 20 bp, synthetic construct
  source 1..20: mol_type = other DNA
taccaggaaacacagaagca

SEQ ID NO: 295962 - DNA, 20 bp, synthetic construct
  source 1..20: mol_type = other DNA
ataccaggaaacacagaagc

SEQ ID NO: 295963 - DNA, 20 bp, synthetic construct
  source 1..20: mol_type = other DNA
gataccaggaaacacagaag

SEQ ID NO: 295964 - DNA, 20 bp, synthetic construct
  source 1..20: mol_type = other DNA
ggataccaggaaacacagaa

SEQ ID NO: 295965 - DNA, 20 bp, synthetic construct
  source 1..20: mol_type = other DNA
aggataccaggaaacacaga

SEQ ID NO: 295966 - DNA, 20 bp, synthetic construct
  source 1..20: mol_type = other DNA
aaggataccaggaaacacag

SEQ ID NO: 295967 - DNA, 20 bp, synthetic construct
  source 1..20: mol_type = other DNA
aaaggataccaggaaacaca

SEQ ID NO: 295968 - DNA, 20 bp, synthetic construct
  source 1..20: mol_type = other DNA
caaaggataccaggaaacac

SEQ ID NO: 295969 - DNA, 20 bp, synthetic construct
  source 1..20: mol_type = other DNA
ccaaaggataccaggaaaca

SEQ ID NO: 295970 - DNA, 20 bp, synthetic construct
  source 1..20: mol_type = other DNA
cccaaaggataccaggaaac

SEQ ID NO: 295971 - DNA, 20 bp, synthetic construct
  source 1..20: mol_type = other DNA
tcccaaaggataccaggaaa

SEQ ID NO: 295972 - DNA, 20 bp, synthetic construct
  source 1..20: mol_type = other DNA
gtcccaaaggataccaggaa

SEQ ID NO: 295973 - DNA, 20 bp, synthetic construct
  source 1..20: mol_type = other DNA
agtcccaaaggataccagga

SEQ ID NO: 295974 - DNA, 20 bp, synthetic construct
  source 1..20: mol_type = other DNA
gagtcccaaaggataccagg

SEQ ID NO: 295975 - DNA, 20 bp, synthetic construct
  source 1..20: mol_type = other DNA
ggagtcccaaaggataccag

SEQ ID NO: 295976 - DNA, 20 bp, synthetic construct
  source 1..20: mol_type = other DNA
aggagtcccaaaggatacca

SEQ ID NO: 295977 - DNA, 20 bp, synthetic construct
  source 1..20: mol_type = other DNA
caggagtcccaaaggatacc

SEQ ID NO: 295978 - DNA, 20 bp, synthetic construct
  source 1..20: mol_type = other DNA
ccaggagtcccaaaggatac

SEQ ID NO: 295979 - DNA, 20 bp, synthetic construct
  source 1..20: mol_type = other DNA
gccaggagtcccaaaggata

SEQ ID NO: 295980 - DNA, 20 bp, synthetic construct
  source 1..20: mol_type = other DNA
agccaggagtcccaaaggat

SEQ ID NO: 295981 - DNA, 20 bp, synthetic construct
  source 1..20: mol_type = other DNA
tagccaggagtcccaaagga

SEQ ID NO: 295982 - DNA, 20 bp, synthetic construct
  source 1..20: mol_type = other DNA
ctagccaggagtcccaaagg

SEQ ID NO: 295983 - DNA, 20 bp, synthetic construct
  source 1..20: mol_type = other DNA
cctagccaggagtcccaaag

SEQ ID NO: 295984 - DNA, 20 bp, synthetic construct
  source 1..20: mol_type = other DNA
acctagccaggagtcccaaa

SEQ ID NO: 295985 - DNA, 20 bp, synthetic construct
  source 1..20: mol_type = other DNA
gacctagccaggagtcccaa

SEQ ID NO: 295986 - DNA, 20 bp, synthetic construct
  source 1..20: mol_type = other DNA
tgacctagccaggagtccca

SEQ ID NO: 295987 - DNA, 20 bp, synthetic construct
  source 1..20: mol_type = other DNA
atgacctagccaggagtccc

SEQ ID NO: 295988 - DNA, 20 bp, synthetic construct
  source 1..20: mol_type = other DNA
catgacctagccaggagtcc

SEQ ID NO: 295989 - DNA, 20 bp, synthetic construct
  source 1..20: mol_type = other DNA
acatgacctagccaggagtc

SEQ ID NO: 295990 - DNA, 20 bp, synthetic construct
  source 1..20: mol_type = other DNA
cacatgacctagccaggagt

SEQ ID NO: 295991 - DNA, 20 bp, synthetic construct
  source 1..20: mol_type = other DNA
acacatgacctagccaggag

SEQ ID NO: 295992 - DNA, 20 bp, synthetic construct
  source 1..20: mol_type = other DNA
aacacatgacctagccagga

SEQ ID NO: 295993 - DNA, 20 bp, synthetic construct
  source 1..20: mol_type = other DNA
aaacacatgacctagccagg

SEQ ID NO: 295994 - DNA, 20 bp, synthetic construct
  source 1..20: mol_type = other DNA
gaaacacatgacctagccag

SEQ ID NO: 295995 - DNA, 20 bp, synthetic construct
  source 1..20: mol_type = other DNA
agaaacacatgacctagcca

SEQ ID NO: 295996 - DNA, 20 bp, synthetic construct
  source 1..20: mol_type = other DNA
gagaaacacatgacctagcc

SEQ ID NO: 295997 - DNA, 20 bp, synthetic construct
  source 1..20: mol_type = other DNA
agagaaacacatgacctagc

SEQ ID NO: 295998 - DNA, 20 bp, synthetic construct
  source 1..20: mol_type = other DNA
tagagaaacacatgacctag

SEQ ID NO: 295999 - DNA, 20 bp, synthetic construct
  source 1..20: mol_type = other DNA
gtagagaaacacatgaccta

SEQ ID NO: 296000 - DNA, 20 bp, synthetic construct
  source 1..20: mol_type = other DNA
agtagagaaacacatgacct

SEQ ID NO: 296001 - DNA, 20 bp, synthetic construct
  source 1..20: mol_type = other DNA
aagtagagaaacacatgacc

SEQ ID NO: 296002 - DNA, 20 bp, synthetic construct
  source 1..20: mol_type = other DNA
aaagtagagaaacacatgac

SEQ ID NO: 296003 - DNA, 20 bp, synthetic construct
  source 1..20: mol_type = other DNA
gaaagtagagaaacacatga

SEQ ID NO: 296004 - DNA, 20 bp, synthetic construct
  source 1..20: mol_type = other DNA
tgaaagtagagaaacacatg

SEQ ID NO: 296005 - DNA, 20 bp, synthetic construct
  source 1..20: mol_type = other DNA
ttgaaagtagagaaacacat

SEQ ID NO: 296006 - DNA, 20 bp, synthetic construct
  source 1..20: mol_type = other DNA
tttgaaagtagagaaacaca

SEQ ID NO: 296007 - DNA, 20 bp, synthetic construct
  source 1..20: mol_type = other DNA
ttttgaaagtagagaaacac

SEQ ID NO: 296008 - DNA, 20 bp, synthetic construct
  source 1..20: mol_type = other DNA
cttttgaaagtagagaaaca

SEQ ID NO: 296009 - DNA, 20 bp, synthetic construct
  source 1..20: mol_type = other DNA
ccttttgaaagtagagaaac

SEQ ID NO: 296010 - DNA, 20 bp, synthetic construct
  source 1..20: mol_type = other DNA
cccttttgaaagtagagaaa

SEQ ID NO: 296011 - DNA, 20 bp, synthetic construct
  source 1..20: mol_type = other DNA
gcccttttgaaagtagagaa

SEQ ID NO: 296012 - DNA, 20 bp, synthetic construct
  source 1..20: mol_type = other DNA
agcccttttgaaagtagaga

SEQ ID NO: 296013 - DNA, 20 bp, synthetic construct
  source 1..20: mol_type = other DNA
aagcccttttgaaagtagag

SEQ ID NO: 296014 - DNA, 20 bp, synthetic construct
  source 1..20: mol_type = other DNA
gaagcccttttgaaagtaga

SEQ ID NO: 296015 - DNA, 20 bp, synthetic construct
  source 1..20: mol_type = other DNA
tgaagcccttttgaaagtag

SEQ ID NO: 296016 - DNA, 20 bp, synthetic construct
  source 1..20: mol_type = other DNA
ctgaagcccttttgaaagta

SEQ ID NO: 296017 - DNA, 20 bp, synthetic construct
  source 1..20: mol_type = other DNA
gctgaagcccttttgaaagt

SEQ ID NO: 296018 - DNA, 20 bp, synthetic construct
  source 1..20: mol_type = other DNA
ggctgaagcccttttgaaag

SEQ ID NO: 296019 - DNA, 20 bp, synthetic construct
  source 1..20: mol_type = other DNA
tggctgaagcccttttgaaa

SEQ ID NO: 296020 - DNA, 20 bp, synthetic construct
  source 1..20: mol_type = other DNA
ctggctgaagcccttttgaa

SEQ ID NO: 296021 - DNA, 20 bp, synthetic construct
  source 1..20: mol_type = other DNA
cctggctgaagcccttttga

SEQ ID NO: 296022 - DNA, 20 bp, synthetic construct
  source 1..20: mol_type = other DNA
gcctggctgaagcccttttg

SEQ ID NO: 296023 - DNA, 20 bp, synthetic construct
  source 1..20: mol_type = other DNA
tgcctggctgaagccctttt

SEQ ID NO: 296024 - DNA, 20 bp, synthetic construct
  source 1..20: mol_type = other DNA
gtgcctggctgaagcccttt

SEQ ID NO: 296025 - DNA, 20 bp, synthetic construct
  source 1..20: mol_type = other DNA
cgtgcctggctgaagccctt

SEQ ID NO: 296026 - DNA, 20 bp, synthetic construct
  source 1..20: mol_type = other DNA
tcgtgcctggctgaagccct

SEQ ID NO: 296027 - DNA, 20 bp, synthetic construct
  source 1..20: mol_type = other DNA
atcgtgcctggctgaagccc

SEQ ID NO: 296028 - DNA, 20 bp, synthetic construct
  source 1..20: mol_type = other DNA
catcgtgcctggctgaagcc

SEQ ID NO: 296029 - DNA, 20 bp, synthetic construct
  source 1..20: mol_type = other DNA
ccatcgtgcctggctgaagc

SEQ ID NO: 296030 - DNA, 20 bp, synthetic construct
  source 1..20: mol_type = other DNA
gccatcgtgcctggctgaag

SEQ ID NO: 296031 - DNA, 20 bp, synthetic construct
  source 1..20: mol_type = other DNA
tgccatcgtgcctggctgaa

SEQ ID NO: 296032 - DNA, 20 bp, synthetic construct
  source 1..20: mol_type = other DNA
atgccatcgtgcctggctga

SEQ ID NO: 296033 - DNA, 20 bp, synthetic construct
  source 1..20: mol_type = other DNA
catgccatcgtgcctggctg

SEQ ID NO: 296034 - DNA, 20 bp, synthetic construct
  source 1..20: mol_type = other DNA
tcatgccatcgtgcctggct

SEQ ID NO: 296035 - DNA, 20 bp, synthetic construct
  source 1..20: mol_type = other DNA
ctcatgccatcgtgcctggc

SEQ ID NO: 296036 - DNA, 20 bp, synthetic construct
  source 1..20: mol_type = other DNA
gctcatgccatcgtgcctgg

SEQ ID NO: 296037 - DNA, 20 bp, synthetic construct
  source 1..20: mol_type = other DNA
ggctcatgccatcgtgcctg

SEQ ID NO: 296038 - DNA, 20 bp, synthetic construct
  source 1..20: mol_type = other DNA
aggctcatgccatcgtgcct

SEQ ID NO: 296039 - DNA, 20 bp, synthetic construct
  source 1..20: mol_type = other DNA
caggctcatgccatcgtgcc

SEQ ID NO: 296040 - DNA, 20 bp, synthetic construct
  source 1..20: mol_type = other DNA
acaggctcatgccatcgtgc

SEQ ID NO: 296041 - DNA, 20 bp, synthetic construct
  source 1..20: mol_type = other DNA
tacaggctcatgccatcgtg

SEQ ID NO: 296042 - DNA, 20 bp, synthetic construct
  source 1..20: mol_type = other DNA
ctacaggctcatgccatcgt

SEQ ID NO: 296043 - DNA, 20 bp, synthetic construct
  source 1..20: mol_type = other DNA
actacaggctcatgccatcg

SEQ ID NO: 296044 - DNA, 20 bp, synthetic construct
  source 1..20: mol_type = other DNA
gactacaggctcatgccatc

SEQ ID NO: 296045 - DNA, 20 bp, synthetic construct
  source 1..20: mol_type = other DNA
ggactacaggctcatgccat

SEQ ID NO: 296046 - DNA, 20 bp, synthetic construct
  source 1..20: mol_type = other DNA
gggactacaggctcatgcca

SEQ ID NO: 296047 - DNA, 20 bp, synthetic construct
  source 1..20: mol_type = other DNA
tgggactacaggctcatgcc

SEQ ID NO: 296048 - DNA, 20 bp, synthetic construct
  source 1..20: mol_type = other DNA
ctgggactacaggctcatgc

SEQ ID NO: 296049 - DNA, 20 bp, synthetic construct
  source 1..20: mol_type = other DNA
actgggactacaggctcatg

SEQ ID NO: 296050 - DNA, 20 bp, synthetic construct
  source 1..20: mol_type = other DNA
aactgggactacaggctcat

SEQ ID NO: 296051 - DNA, 20 bp, synthetic construct
  source 1..20: mol_type = other DNA
caactgggactacaggctca

SEQ ID NO: 296052 - DNA, 20 bp, synthetic construct
  source 1..20: mol_type = other DNA
gcaactgggactacaggctc

SEQ ID NO: 296053 - DNA, 20 bp, synthetic construct
  source 1..20: mol_type = other DNA
agcaactgggactacaggct

SEQ ID NO: 296054 - DNA, 20 bp, synthetic construct
  source 1..20: mol_type = other DNA
gagcaactgggactacaggc

SEQ ID NO: 296055 - DNA, 20 bp, synthetic construct
  source 1..20: mol_type = other DNA
agagcaactgggactacagg

SEQ ID NO: 296056 - DNA, 20 bp, synthetic construct
  source 1..20: mol_type = other DNA
cagagcaactgggactacag

SEQ ID NO: 296057 - DNA, 20 bp, synthetic construct
  source 1..20: mol_type = other DNA
ccagagcaactgggactaca

SEQ ID NO: 296058 - DNA, 20 bp, synthetic construct
  source 1..20: mol_type = other DNA
tccagagcaactgggactac

SEQ ID NO: 296059 - DNA, 20 bp, synthetic construct
  source 1..20: mol_type = other DNA
ctccagagcaactgggacta

SEQ ID NO: 296060 - DNA, 20 bp, synthetic construct
  source 1..20: mol_type = other DNA
cctccagagcaactgggact

SEQ ID NO: 296061 - DNA, 20 bp, synthetic construct
  source 1..20: mol_type = other DNA
acctccagagcaactgggac

SEQ ID NO: 296062 - DNA, 20 bp, synthetic construct
  source 1..20: mol_type = other DNA
aacctccagagcaactggga

SEQ ID NO: 296063 - DNA, 20 bp, synthetic construct
  source 1..20: mol_type = other DNA
taacctccagagcaactggg

SEQ ID NO: 296064 - DNA, 20 bp, synthetic construct
  source 1..20: mol_type = other DNA
ttaacctccagagcaactgg

SEQ ID NO: 296065 - DNA, 20 bp, synthetic construct
  source 1..20: mol_type = other DNA
cttaacctccagagcaactg

SEQ ID NO: 296066 - DNA, 20 bp, synthetic construct
  source 1..20: mol_type = other DNA
ccttaacctccagagcaact

SEQ ID NO: 296067 - DNA, 20 bp, synthetic construct
  source 1..20: mol_type = other DNA
accttaacctccagagcaac

SEQ ID NO: 296068 - DNA, 20 bp, synthetic construct
  source 1..20: mol_type = other DNA
caccttaacctccagagcaa

SEQ ID NO: 296069 - DNA, 20 bp, synthetic construct
  source 1..20: mol_type = other DNA
ccaccttaacctccagagca

SEQ ID NO: 296070 - DNA, 20 bp, synthetic construct
  source 1..20: mol_type = other DNA
cccaccttaacctccagagc

SEQ ID NO: 296071 - DNA, 20 bp, synthetic construct
  source 1..20: mol_type = other DNA
tcccaccttaacctccagag

SEQ ID NO: 296072 - DNA, 20 bp, synthetic construct
  source 1..20: mol_type = other DNA
ttcccaccttaacctccaga

SEQ ID NO: 296073 - DNA, 20 bp, synthetic construct
  source 1..20: mol_type = other DNA
cttcccaccttaacctccag

SEQ ID NO: 296074 - DNA, 20 bp, synthetic construct
  source 1..20: mol_type = other DNA
tcttcccaccttaacctcca

SEQ ID NO: 296075 - DNA, 20 bp, synthetic construct
  source 1..20: mol_type = other DNA
atcttcccaccttaacctcc

SEQ ID NO: 296076 - DNA, 20 bp, synthetic construct
  source 1..20: mol_type = other DNA
aatcttcccaccttaacctc

SEQ ID NO: 296077 - DNA, 20 bp, synthetic construct
  source 1..20: mol_type = other DNA
caatcttcccaccttaacct

SEQ ID NO: 296078 - DNA, 20 bp, synthetic construct
  source 1..20: mol_type = other DNA
gcaatcttcccaccttaacc

SEQ ID NO: 296079 - DNA, 20 bp, synthetic construct
  source 1..20: mol_type = other DNA
agcaatcttcccaccttaac

SEQ ID NO: 296080 - DNA, 20 bp, synthetic construct
  source 1..20: mol_type = other DNA
aagcaatcttcccaccttaa

SEQ ID NO: 296081 - DNA, 20 bp, synthetic construct
  source 1..20: mol_type = other DNA
caagcaatcttcccacctta

SEQ ID NO: 296082 - DNA, 20 bp, synthetic construct
  source 1..20: mol_type = other DNA
tcaagcaatcttcccacctt

SEQ ID NO: 296083 - DNA, 20 bp, synthetic construct
  source 1..20: mol_type = other DNA
ctcaagcaatcttcccacct

SEQ ID NO: 296084 - DNA, 20 bp, synthetic construct
  source 1..20: mol_type = other DNA
gctcaagcaatcttcccacc

SEQ ID NO: 296085 - DNA, 20 bp, synthetic construct
  source 1..20: mol_type = other DNA
ggctcaagcaatcttcccac

SEQ ID NO: 296086 - DNA, 20 bp, synthetic construct
  source 1..20: mol_type = other DNA
gggctcaagcaatcttccca

SEQ ID NO: 296087 - DNA, 20 bp, synthetic construct
  source 1..20: mol_type = other DNA
tgggctcaagcaatcttccc

SEQ ID NO: 296088 - DNA, 20 bp, synthetic construct
  source 1..20: mol_type = other DNA
ctgggctcaagcaatcttcc

SEQ ID NO: 296089 - DNA, 20 bp, synthetic construct
  source 1..20: mol_type = other DNA
cctgggctcaagcaatcttc

SEQ ID NO: 296090 - DNA, 20 bp, synthetic construct
  source 1..20: mol_type = other DNA
tcctgggctcaagcaatctt

SEQ ID NO: 296091 - DNA, 20 bp, synthetic construct
  source 1..20: mol_type = other DNA
ttcctgggctcaagcaatct

SEQ ID NO: 296092 - DNA, 20 bp, synthetic construct
  source 1..20: mol_type = other DNA
attcctgggctcaagcaatc

SEQ ID NO: 296093 - DNA, 20 bp, synthetic construct
  source 1..20: mol_type = other DNA
aattcctgggctcaagcaat

SEQ ID NO: 296094 - DNA, 20 bp, synthetic construct
  source 1..20: mol_type = other DNA
aaattcctgggctcaagcaa

SEQ ID NO: 296095 - DNA, 20 bp, synthetic construct
  source 1..20: mol_type = other DNA
caaattcctgggctcaagca

SEQ ID NO: 296096 - DNA, 20 bp, synthetic construct
  source 1..20: mol_type = other DNA
tcaaattcctgggctcaagc

SEQ ID NO: 296097 - DNA, 20 bp, synthetic construct
  source 1..20: mol_type = other DNA
ctcaaattcctgggctcaag

SEQ ID NO: 296098 - DNA, 20 bp, synthetic construct
  source 1..20: mol_type = other DNA
cctcaaattcctgggctcaa

SEQ ID NO: 296099 - DNA, 20 bp, synthetic construct
  source 1..20: mol_type = other DNA
gcctcaaattcctgggctca

SEQ ID NO: 296100 - DNA, 20 bp, synthetic construct
  source 1..20: mol_type = other DNA
ggcctcaaattcctgggctc

SEQ ID NO: 296101 - DNA, 20 bp, synthetic construct
  source 1..20: mol_type = other DNA
tggcctcaaattcctgggct

SEQ ID NO: 296102 - DNA, 20 bp, synthetic construct
  source 1..20: mol_type = other DNA
ctggcctcaaattcctgggc

SEQ ID NO: 296103 - DNA, 20 bp, synthetic construct
  source 1..20: mol_type = other DNA
gctggcctcaaattcctggg

SEQ ID NO: 296104 - DNA, 20 bp, synthetic construct
  source 1..20: mol_type = other DNA
ggctggcctcaaattcctgg

SEQ ID NO: 296105 - DNA, 20 bp, synthetic construct
  source 1..20: mol_type = other DNA
aggctggcctcaaattcctg

SEQ ID NO: 296106 - DNA, 20 bp, synthetic construct
  source 1..20: mol_type = other DNA
caggctggcctcaaattcct

SEQ ID NO: 296107 - DNA, 20 bp, synthetic construct
  source 1..20: mol_type = other DNA
ccaggctggcctcaaattcc

SEQ ID NO: 296108 - DNA, 20 bp, synthetic construct
  source 1..20: mol_type = other DNA
cccaggctggcctcaaattc

SEQ ID NO: 296109 - DNA, 20 bp, synthetic construct
  source 1..20: mol_type = other DNA
gcccaggctggcctcaaatt

SEQ ID NO: 296110 - DNA, 20 bp, synthetic construct
  source 1..20: mol_type = other DNA
tgcccaggctggcctcaaat

SEQ ID NO: 296111 - DNA, 20 bp, synthetic construct
  source 1..20: mol_type = other DNA
ttgcccaggctggcctcaaa

SEQ ID NO: 296112 - DNA, 20 bp, synthetic construct
  source 1..20: mol_type = other DNA
cttgcccaggctggcctcaa

SEQ ID NO: 296113 - DNA, 20 bp, synthetic construct
  source 1..20: mol_type = other DNA
acttgcccaggctggcctca

SEQ ID NO: 296114 - DNA, 20 bp, synthetic construct
  source 1..20: mol_type = other DNA
tacttgcccaggctggcctc

SEQ ID NO: 296115 - DNA, 20 bp, synthetic construct
  source 1..20: mol_type = other DNA
ctacttgcccaggctggcct

SEQ ID NO: 296116 - DNA, 20 bp, synthetic construct
  source 1..20: mol_type = other DNA
tctacttgcccaggctggcc

SEQ ID NO: 296117 - DNA, 20 bp, synthetic construct
  source 1..20: mol_type = other DNA
atctacttgcccaggctggc

SEQ ID NO: 296118 - DNA, 20 bp, synthetic construct
  source 1..20: mol_type = other DNA
tatctacttgcccaggctgg

SEQ ID NO: 296119 - DNA, 20 bp, synthetic construct
  source 1..20: mol_type = other DNA
ctatctacttgcccaggctg

SEQ ID NO: 296120 - DNA, 20 bp, synthetic construct
  source 1..20: mol_type = other DNA
cctatctacttgcccaggct

SEQ ID NO: 296121 - DNA, 20 bp, synthetic construct
  source 1..20: mol_type = other DNA
acctatctacttgcccaggc

SEQ ID NO: 296122 - DNA, 20 bp, synthetic construct
  source 1..20: mol_type = other DNA
tacctatctacttgcccagg

SEQ ID NO: 296123 - DNA, 20 bp, synthetic construct
  source 1..20: mol_type = other DNA
ctacctatctacttgcccag

SEQ ID NO: 296124 - DNA, 20 bp, synthetic construct
  source 1..20: mol_type = other DNA
tctacctatctacttgccca

SEQ ID NO: 296125 - DNA, 20 bp, synthetic construct
  source 1..20: mol_type = other DNA
atctacctatctacttgccc

SEQ ID NO: 296126 - DNA, 20 bp, synthetic construct
  source 1..20: mol_type = other DNA
catctacctatctacttgcc

SEQ ID NO: 296127 - DNA, 20 bp, synthetic construct
  source 1..20: mol_type = other DNA
tcatctacctatctacttgc

SEQ ID NO: 296128 - DNA, 20 bp, synthetic construct
  source 1..20: mol_type = other DNA
atcatctacctatctacttg

SEQ ID NO: 296129 - DNA, 20 bp, synthetic construct
  source 1..20: mol_type = other DNA
aatcatctacctatctactt

SEQ ID NO: 296130 - DNA, 20 bp, synthetic construct
  source 1..20: mol_type = other DNA
caatcatctacctatctact

SEQ ID NO: 296131 - DNA, 20 bp, synthetic construct
  source 1..20: mol_type = other DNA
tcaatcatctacctatctac

SEQ ID NO: 296132 - DNA, 20 bp, synthetic construct
  source 1..20: mol_type = other DNA
atcaatcatctacctatcta

SEQ ID NO: 296133 - DNA, 20 bp, synthetic construct
  source 1..20: mol_type = other DNA
tatcaatcatctacctatct

SEQ ID NO: 296134 - DNA, 20 bp, synthetic construct
  source 1..20: mol_type = other DNA
ctatcaatcatctacctatc

SEQ ID NO: 296135 - DNA, 20 bp, synthetic construct
  source 1..20: mol_type = other DNA
tctatcaatcatctacctat

SEQ ID NO: 296136 - DNA, 20 bp, synthetic construct
  source 1..20: mol_type = other DNA
atctatcaatcatctaccta

SEQ ID NO: 296137 - DNA, 20 bp, synthetic construct
  source 1..20: mol_type = other DNA
tatctatcaatcatctacct

SEQ ID NO: 296138 - DNA, 20 bp, synthetic construct
  source 1..20: mol_type = other DNA
ctatctatcaatcatctacc

SEQ ID NO: 296139 - DNA, 20 bp, synthetic construct
  source 1..20: mol_type = other DNA
tctatctatcaatcatctac

SEQ ID NO: 296140 - DNA, 20 bp, synthetic construct
  source 1..20: mol_type = other DNA
atctatctatcaatcatcta

SEQ ID NO: 296141 - DNA, 20 bp, synthetic construct
  source 1..20: mol_type = other DNA
tatctatctatcaatcatct

SEQ ID NO: 296142 - DNA, 20 bp, synthetic construct
  source 1..20: mol_type = other DNA
ctatctatctatcaatcatc

SEQ ID NO: 296143 - DNA, 20 bp, synthetic construct
  source 1..20: mol_type = other DNA
tctatctatctatcaatcat

SEQ ID NO: 296144 - DNA, 20 bp, synthetic construct
  source 1..20: mol_type = other DNA
atctatctatctatcaatca

SEQ ID NO: 296145 - DNA, 20 bp, synthetic construct
  source 1..20: mol_type = other DNA
tatctatctatctatcaatc

SEQ ID NO: 296146 - DNA, 20 bp, synthetic construct
  source 1..20: mol_type = other DNA
ctatctatctatctatcaat

SEQ ID NO: 296147 - DNA, 20 bp, synthetic construct
  source 1..20: mol_type = other DNA
tctatctatctatctatcaa

SEQ ID NO: 296148 - DNA, 20 bp, synthetic construct
  source 1..20: mol_type = other DNA
atctatctatctatctatca

SEQ ID NO: 296149 - DNA, 20 bp, synthetic construct
  source 1..20: mol_type = other DNA
tatctatctatctatctatc

SEQ ID NO: 296150 - DNA, 20 bp, synthetic construct
  source 1..20: mol_type = other DNA
ttatctatctatctatctat

SEQ ID NO: 296151 - DNA, 20 bp, synthetic construct
  source 1..20: mol_type = other DNA
tttatctatctatctatcta

SEQ ID NO: 296152 - DNA, 20 bp, synthetic construct
  source 1..20: mol_type = other DNA
atttatctatctatctatct

SEQ ID NO: 296153 - DNA, 20 bp, synthetic construct
  source 1..20: mol_type = other DNA
tatttatctatctatctatc

SEQ ID NO: 296154 - DNA, 20 bp, synthetic construct
  source 1..20: mol_type = other DNA
ctatttatctatctatctat

SEQ ID NO: 296155 - DNA, 20 bp, synthetic construct
  source 1..20: mol_type = other DNA
tctatttatctatctatcta

SEQ ID NO: 296156 - DNA, 20 bp, synthetic construct
  source 1..20: mol_type = other DNA
atctatttatctatctatct

SEQ ID NO: 296157 - DNA, 20 bp, synthetic construct
  source 1..20: mol_type = other DNA
catctatttatctatctatc

SEQ ID NO: 296158 - DNA, 20 bp, synthetic construct
  source 1..20: mol_type = other DNA
ccatctatttatctatctat

SEQ ID NO: 296159 - DNA, 20 bp, synthetic construct
  source 1..20: mol_type = other DNA
tccatctatttatctatcta

SEQ ID NO: 296160 - DNA, 20 bp, synthetic construct
  source 1..20: mol_type = other DNA
atccatctatttatctatct

SEQ ID NO: 296161 - DNA, 20 bp, synthetic construct
  source 1..20: mol_type = other DNA
tatccatctatttatctatc

SEQ ID NO: 296162 - DNA, 20 bp, synthetic construct
  source 1..20: mol_type = other DNA
ctatccatctatttatctat

SEQ ID NO: 296163 - DNA, 20 bp, synthetic construct
  source 1..20: mol_type = other DNA
tctatccatctatttatcta

SEQ ID NO: 296164 - DNA, 20 bp, synthetic construct
  source 1..20: mol_type = other DNA
atctatccatctatttatct

SEQ ID NO: 296165 - DNA, 20 bp, synthetic construct
  source 1..20: mol_type = other DNA
tatctatccatctatttatc

SEQ ID NO: 296166 - DNA, 20 bp, synthetic construct
  source 1..20: mol_type = other DNA
ttatctatccatctatttat

SEQ ID NO: 296167 - DNA, 20 bp, synthetic construct
  source 1..20: mol_type = other DNA
cttatctatccatctattta

SEQ ID NO: 296168 - DNA, 20 bp, synthetic construct
  source 1..20: mol_type = other DNA
acttatctatccatctattt

SEQ ID NO: 296169 - DNA, 20 bp, synthetic construct
  source 1..20: mol_type = other DNA
gacttatctatccatctatt

SEQ ID NO: 296170 - DNA, 20 bp, synthetic construct
  source 1..20: mol_type = other DNA
cgacttatctatccatctat

SEQ ID NO: 296171 - DNA, 20 bp, synthetic construct
  source 1..20: mol_type = other DNA
gcgacttatctatccatcta

SEQ ID NO: 296172 - DNA, 20 bp, synthetic construct
  source 1..20: mol_type = other DNA
agcgacttatctatccatct

SEQ ID NO: 296173 - DNA, 20 bp, synthetic construct
  source 1..20: mol_type = other DNA
tagcgacttatctatccatc

SEQ ID NO: 296174 - DNA, 20 bp, synthetic construct
  source 1..20: mol_type = other DNA
ctagcgacttatctatccat

SEQ ID NO: 296175 - DNA, 20 bp, synthetic construct
  source 1..20: mol_type = other DNA
tctagcgacttatctatcca

SEQ ID NO: 296176 - DNA, 20 bp, synthetic construct
  source 1..20: mol_type = other DNA
gtctagcgacttatctatcc

SEQ ID NO: 296177 - DNA, 20 bp, synthetic construct
  source 1..20: mol_type = other DNA
tgtctagcgacttatctatc

SEQ ID NO: 296178 - DNA, 20 bp, synthetic construct
  source 1..20: mol_type = other DNA
ctgtctagcgacttatctat

SEQ ID NO: 296179 - DNA, 20 bp, synthetic construct
  source 1..20: mol_type = other DNA
actgtctagcgacttatcta

SEQ ID NO: 296180 - DNA, 20 bp, synthetic construct
  source 1..20: mol_type = other DNA
gactgtctagcgacttatct

SEQ ID NO: 296181 - DNA, 20 bp, synthetic construct
  source 1..20: mol_type = other DNA
tgactgtctagcgacttatc

SEQ ID NO: 296182 - DNA, 20 bp, synthetic construct
  source 1..20: mol_type = other DNA
atgactgtctagcgacttat

SEQ ID NO: 296183 - DNA, 20 bp, synthetic construct
  source 1..20: mol_type = other DNA
gatgactgtctagcgactta

SEQ ID NO: 296184 - DNA, 20 bp, synthetic construct
  source 1..20: mol_type = other DNA
ggatgactgtctagcgactt

SEQ ID NO: 296185 - DNA, 20 bp, synthetic construct
  source 1..20: mol_type = other DNA
tggatgactgtctagcgact

SEQ ID NO: 296186 - DNA, 20 bp, synthetic construct
  source 1..20: mol_type = other DNA
atggatgactgtctagcgac

SEQ ID NO: 296187 - DNA, 20 bp, synthetic construct
  source 1..20: mol_type = other DNA
gatggatgactgtctagcga

SEQ ID NO: 296188 - DNA, 20 bp, synthetic construct
  source 1..20: mol_type = other DNA
ggatggatgactgtctagcg

SEQ ID NO: 296189 - DNA, 20 bp, synthetic construct
  source 1..20: mol_type = other DNA
tggatggatgactgtctagc

SEQ ID NO: 296190 - DNA, 20 bp, synthetic construct
  source 1..20: mol_type = other DNA
gtggatggatgactgtctag

SEQ ID NO: 296191 - DNA, 20 bp, synthetic construct
  source 1..20: mol_type = other DNA
ggtggatggatgactgtcta

SEQ ID NO: 296192 - DNA, 20 bp, synthetic construct
  source 1..20: mol_type = other DNA
gggtggatggatgactgtct

SEQ ID NO: 296193 - DNA, 20 bp, synthetic construct
  source 1..20: mol_type = other DNA
tgggtggatggatgactgtc

SEQ ID NO: 296194 - DNA, 20 bp, synthetic construct
  source 1..20: mol_type = other DNA
atgggtggatggatgactgt

SEQ ID NO: 296195 - DNA, 20 bp, synthetic construct
  source 1..20: mol_type = other DNA
gatgggtggatggatgactg

SEQ ID NO: 296196 - DNA, 20 bp, synthetic construct
  source 1..20: mol_type = other DNA
ggatgggtggatggatgact

SEQ ID NO: 296197 - DNA, 20 bp, synthetic construct
  source 1..20: mol_type = other DNA
tggatgggtggatggatgac

SEQ ID NO: 296198 - DNA, 20 bp, synthetic construct
  source 1..20: mol_type = other DNA
gtggatgggtggatggatga

SEQ ID NO: 296199 - DNA, 20 bp, synthetic construct
  source 1..20: mol_type = other DNA
tgtggatgggtggatggatg

SEQ ID NO: 296200 - DNA, 20 bp, synthetic construct
  source 1..20: mol_type = other DNA
gtgtggatgggtggatggat

SEQ ID NO: 296201 - DNA, 20 bp, synthetic construct
  source 1..20: mol_type = other DNA
tgtgtggatgggtggatgga

SEQ ID NO: 296202 - DNA, 20 bp, synthetic construct
  source 1..20: mol_type = other DNA
atgtgtggatgggtggatgg

SEQ ID NO: 296203 - DNA, 20 bp, synthetic construct
  source 1..20: mol_type = other DNA
tatgtgtggatgggtggatg

SEQ ID NO: 296204 - DNA, 20 bp, synthetic construct
  source 1..20: mol_type = other DNA
ttatgtgtggatgggtggat

SEQ ID NO: 296205 - DNA, 20 bp, synthetic construct
  source 1..20: mol_type = other DNA
tttatgtgtggatgggtgga

SEQ ID NO: 296206 - DNA, 20 bp, synthetic construct
  source 1..20: mol_type = other DNA
ttttatgtgtggatgggtgg

SEQ ID NO: 296207 - DNA, 20 bp, synthetic construct
  source 1..20: mol_type = other DNA
tttttatgtgtggatgggtg

SEQ ID NO: 296208 - DNA, 20 bp, synthetic construct
  source 1..20: mol_type = other DNA
ctttttatgtgtggatgggt

SEQ ID NO: 296209 - DNA, 20 bp, synthetic construct
  source 1..20: mol_type = other DNA
cctttttatgtgtggatggg

SEQ ID NO: 296210 - DNA, 20 bp, synthetic construct
  source 1..20: mol_type = other DNA
gcctttttatgtgtggatgg

SEQ ID NO: 296211 - DNA, 20 bp, synthetic construct
  source 1..20: mol_type = other DNA
ggcctttttatgtgtggatg

SEQ ID NO: 296212 - DNA, 20 bp, synthetic construct
  source 1..20: mol_type = other DNA
aggcctttttatgtgtggat

SEQ ID NO: 296213 - DNA, 20 bp, synthetic construct
  source 1..20: mol_type = other DNA
aaggcctttttatgtgtgga

SEQ ID NO: 296214 - DNA, 20 bp, synthetic construct
  source 1..20: mol_type = other DNA
aaaggcctttttatgtgtgg

SEQ ID NO: 296215 - DNA, 20 bp, synthetic construct
  source 1..20: mol_type = other DNA
caaaggcctttttatgtgtg

SEQ ID NO: 296216 - DNA, 20 bp, synthetic construct
  source 1..20: mol_type = other DNA
acaaaggcctttttatgtgt

SEQ ID NO: 296217 - DNA, 20 bp, synthetic construct
  source 1..20: mol_type = other DNA
gacaaaggcctttttatgtg

SEQ ID NO: 296218 - DNA, 20 bp, synthetic construct
  source 1..20: mol_type = other DNA
tgacaaaggcctttttatgt

SEQ ID NO: 296219 - DNA, 20 bp, synthetic construct
  source 1..20: mol_type = other DNA
atgacaaaggcctttttatg

SEQ ID NO: 296220 - DNA, 20 bp, synthetic construct
  source 1..20: mol_type = other DNA
catgacaaaggcctttttat

SEQ ID NO: 296221 - DNA, 20 bp, synthetic construct
  source 1..20: mol_type = other DNA
acatgacaaaggccttttta

SEQ ID NO: 296222 - DNA, 20 bp, synthetic construct
  source 1..20: mol_type = other DNA
gacatgacaaaggccttttt

SEQ ID NO: 296223 - DNA, 20 bp, synthetic construct
  source 1..20: mol_type = other DNA
tgacatgacaaaggcctttt

SEQ ID NO: 296224 - DNA, 20 bp, synthetic construct
  source 1..20: mol_type = other DNA
atgacatgacaaaggccttt

SEQ ID NO: 296225 - DNA, 20 bp, synthetic construct
  source 1..20: mol_type = other DNA
catgacatgacaaaggcctt

SEQ ID NO: 296226 - DNA, 20 bp, synthetic construct
  source 1..20: mol_type = other DNA
acatgacatgacaaaggcct

SEQ ID NO: 296227 - DNA, 20 bp, synthetic construct
  source 1..20: mol_type = other DNA
aacatgacatgacaaaggcc

SEQ ID NO: 296228 - DNA, 20 bp, synthetic construct
  source 1..20: mol_type = other DNA
aaacatgacatgacaaaggc

SEQ ID NO: 296229 - DNA, 20 bp, synthetic construct
  source 1..20: mol_type = other DNA
aaaacatgacatgacaaagg

SEQ ID NO: 296230 - DNA, 20 bp, synthetic construct
  source 1..20: mol_type = other DNA
caaaacatgacatgacaaag

SEQ ID NO: 296231 - DNA, 20 bp, synthetic construct
  source 1..20: mol_type = other DNA
acaaaacatgacatgacaaa

SEQ ID NO: 296232 - DNA, 20 bp, synthetic construct
  source 1..20: mol_type = other DNA
cacaaaacatgacatgacaa

SEQ ID NO: 296233 - DNA, 20 bp, synthetic construct
  source 1..20: mol_type = other DNA
ccacaaaacatgacatgaca

SEQ ID NO: 296234 - DNA, 20 bp, synthetic construct
  source 1..20: mol_type = other DNA
gccacaaaacatgacatgac

SEQ ID NO: 296235 - DNA, 20 bp, synthetic construct
  source 1..20: mol_type = other DNA
ggccacaaaacatgacatga

SEQ ID NO: 296236 - DNA, 20 bp, synthetic construct
  source 1..20: mol_type = other DNA
gggccacaaaacatgacatg

SEQ ID NO: 296237 - DNA, 20 bp, synthetic construct
  source 1..20: mol_type = other DNA
tgggccacaaaacatgacat

SEQ ID NO: 296238 - DNA, 20 bp, synthetic construct
  source 1..20: mol_type = other DNA
gtgggccacaaaacatgaca

SEQ ID NO: 296239 - DNA, 20 bp, synthetic construct
  source 1..20: mol_type = other DNA
ggtgggccacaaaacatgac

SEQ ID NO: 296240 - DNA, 20 bp, synthetic construct
  source 1..20: mol_type = other DNA
aggtgggccacaaaacatga

SEQ ID NO: 296241 - DNA, 20 bp, synthetic construct
  source 1..20: mol_type = other DNA
caggtgggccacaaaacatg

SEQ ID NO: 296242 - DNA, 20 bp, synthetic construct
  source 1..20: mol_type = other DNA
gcaggtgggccacaaaacat

SEQ ID NO: 296243 - DNA, 20 bp, synthetic construct
  source 1..20: mol_type = other DNA
ggcaggtgggccacaaaaca

SEQ ID NO: 296244 - DNA, 20 bp, synthetic construct
  source 1..20: mol_type = other DNA
tggcaggtgggccacaaaac

SEQ ID NO: 296245 - DNA, 20 bp, synthetic construct
  source 1..20: mol_type = other DNA
ctggcaggtgggccacaaaa

SEQ ID NO: 296246 - DNA, 20 bp, synthetic construct
  source 1..20: mol_type = other DNA
actggcaggtgggccacaaa

SEQ ID NO: 296247 - DNA, 20 bp, synthetic construct
  source 1..20: mol_type = other DNA
cactggcaggtgggccacaa

SEQ ID NO: 296248 - DNA, 20 bp, synthetic construct
  source 1..20: mol_type = other DNA
acactggcaggtgggccaca

SEQ ID NO: 296249 - DNA, 20 bp, synthetic construct
  source 1..20: mol_type = other DNA
aacactggcaggtgggccac

SEQ ID NO: 296250 - DNA, 20 bp, synthetic construct
  source 1..20: mol_type = other DNA
caacactggcaggtgggcca

SEQ ID NO: 296251 - DNA, 20 bp, synthetic construct
  source 1..20: mol_type = other DNA
gcaacactggcaggtgggcc

SEQ ID NO: 296252 - DNA, 20 bp, synthetic construct
  source 1..20: mol_type = other DNA
ggcaacactggcaggtgggc

SEQ ID NO: 296253 - DNA, 20 bp, synthetic construct
  source 1..20: mol_type = other DNA
gggcaacactggcaggtggg

SEQ ID NO: 296254 - DNA, 20 bp, synthetic construct
  source 1..20: mol_type = other DNA
tgggcaacactggcaggtgg

SEQ ID NO: 296255 - DNA, 20 bp, synthetic construct
  source 1..20: mol_type = other DNA
gtgggcaacactggcaggtg

SEQ ID NO: 296256 - DNA, 20 bp, synthetic construct
  source 1..20: mol_type = other DNA
tgtgggcaacactggcaggt

SEQ ID NO: 296257 - DNA, 20 bp, synthetic construct
  source 1..20: mol_type = other DNA
ctgtgggcaacactggcagg

SEQ ID NO: 296258 - DNA, 20 bp, synthetic construct
  source 1..20: mol_type = other DNA
actgtgggcaacactggcag

SEQ ID NO: 296259 - DNA, 20 bp, synthetic construct
  source 1..20: mol_type = other DNA
aactgtgggcaacactggca

SEQ ID NO: 296260 - DNA, 20 bp, synthetic construct
  source 1..20: mol_type = other DNA
caactgtgggcaacactggc

SEQ ID NO: 296261 - DNA, 20 bp, synthetic construct
  source 1..20: mol_type = other DNA
gcaactgtgggcaacactgg

SEQ ID NO: 296262 - DNA, 20 bp, synthetic construct
  source 1..20: mol_type = other DNA
agcaactgtgggcaacactg

SEQ ID NO: 296263 - DNA, 20 bp, synthetic construct
  source 1..20: mol_type = other DNA
cagcaactgtgggcaacact

SEQ ID NO: 296264 - DNA, 20 bp, synthetic construct
  source 1..20: mol_type = other DNA
gcagcaactgtgggcaacac

SEQ ID NO: 296265 - DNA, 20 bp, synthetic construct
  source 1..20: mol_type = other DNA
ggcagcaactgtgggcaaca

SEQ ID NO: 296266 - DNA, 20 bp, synthetic construct
  source 1..20: mol_type = other DNA
gggcagcaactgtgggcaac

SEQ ID NO: 296267 - DNA, 20 bp, synthetic construct
  source 1..20: mol_type = other DNA
ggggcagcaactgtgggcaa

SEQ ID NO: 296268 - DNA, 20 bp, synthetic construct
  source 1..20: mol_type = other DNA
aggggcagcaactgtgggca

SEQ ID NO: 296269 - DNA, 20 bp, synthetic construct
  source 1..20: mol_type = other DNA
gaggggcagcaactgtgggc

SEQ ID NO: 296270 - DNA, 20 bp, synthetic construct
  source 1..20: mol_type = other DNA
ggaggggcagcaactgtggg

SEQ ID NO: 296271 - DNA, 20 bp, synthetic construct
  source 1..20: mol_type = other DNA
tggaggggcagcaactgtgg

SEQ ID NO: 296272 - DNA, 20 bp, synthetic construct
  source 1..20: mol_type = other DNA
ttggaggggcagcaactgtg

SEQ ID NO: 296273 - DNA, 20 bp, synthetic construct
  source 1..20: mol_type = other DNA
tttggaggggcagcaactgt

SEQ ID NO: 296274 - DNA, 20 bp, synthetic construct
  source 1..20: mol_type = other DNA
gtttggaggggcagcaactg

SEQ ID NO: 296275 - DNA, 20 bp, synthetic construct
  source 1..20: mol_type = other DNA
agtttggaggggcagcaact

SEQ ID NO: 296276 - DNA, 20 bp, synthetic construct
  source 1..20: mol_type = other DNA
gagtttggaggggcagcaac

SEQ ID NO: 296277 - DNA, 20 bp, synthetic construct
  source 1..20: mol_type = other DNA
tgagtttggaggggcagcaa

SEQ ID NO: 296278 - DNA, 20 bp, synthetic construct
  source 1..20: mol_type = other DNA
atgagtttggaggggcagca

SEQ ID NO: 296279 - DNA, 20 bp, synthetic construct
  source 1..20: mol_type = other DNA
gatgagtttggaggggcagc

SEQ ID NO: 296280 - DNA, 20 bp, synthetic construct
  source 1..20: mol_type = other DNA
tgatgagtttggaggggcag

SEQ ID NO: 296281 - DNA, 20 bp, synthetic construct
  source 1..20: mol_type = other DNA
ctgatgagtttggaggggca

SEQ ID NO: 296282 - DNA, 20 bp, synthetic construct
  source 1..20: mol_type = other DNA
actgatgagtttggaggggc

SEQ ID NO: 296283 - DNA, 20 bp, synthetic construct
  source 1..20: mol_type = other DNA
gactgatgagtttggagggg

SEQ ID NO: 296284 - DNA, 20 bp, synthetic construct
  source 1..20: mol_type = other DNA
tgactgatgagtttggaggg

SEQ ID NO: 296285 - DNA, 20 bp, synthetic construct
  source 1..20: mol_type = other DNA
gtgactgatgagtttggagg

SEQ ID NO: 296286 - DNA, 20 bp, synthetic construct
  source 1..20: mol_type = other DNA
agtgactgatgagtttggag

SEQ ID NO: 296287 - DNA, 20 bp, synthetic construct
  source 1..20: mol_type = other DNA
cagtgactgatgagtttgga

SEQ ID NO: 296288 - DNA, 20 bp, synthetic construct
  source 1..20: mol_type = other DNA
ccagtgactgatgagtttgg

SEQ ID NO: 296289 - DNA, 20 bp, synthetic construct
  source 1..20: mol_type = other DNA
gccagtgactgatgagtttg

SEQ ID NO: 296290 - DNA, 20 bp, synthetic construct
  source 1..20: mol_type = other DNA
tgccagtgactgatgagttt

SEQ ID NO: 296291 - DNA, 20 bp, synthetic construct
  source 1..20: mol_type = other DNA
ttgccagtgactgatgagtt

SEQ ID NO: 296292 - DNA, 20 bp, synthetic construct
  source 1..20: mol_type = other DNA
tttgccagtgactgatgagt

SEQ ID NO: 296293 - DNA, 20 bp, synthetic construct
  source 1..20: mol_type = other DNA
gtttgccagtgactgatgag

SEQ ID NO: 296294 - DNA, 20 bp, synthetic construct
  source 1..20: mol_type = other DNA
tgtttgccagtgactgatga

SEQ ID NO: 296295 - DNA, 20 bp, synthetic construct
  source 1..20: mol_type = other DNA
ctgtttgccagtgactgatg

SEQ ID NO: 296296 - DNA, 20 bp, synthetic construct
  source 1..20: mol_type = other DNA
cctgtttgccagtgactgat

SEQ ID NO: 296297 - DNA, 20 bp, synthetic construct
  source 1..20: mol_type = other DNA
tcctgtttgccagtgactga

SEQ ID NO: 296298 - DNA, 20 bp, synthetic construct
  source 1..20: mol_type = other DNA
ctcctgtttgccagtgactg

SEQ ID NO: 296299 - DNA, 20 bp, synthetic construct
  source 1..20: mol_type = other DNA
cctcctgtttgccagtgact

SEQ ID NO: 296300 - DNA, 20 bp, synthetic construct
  source 1..20: mol_type = other DNA
tcctcctgtttgccagtgac

SEQ ID NO: 296301 - DNA, 20 bp, synthetic construct
  source 1..20: mol_type = other DNA
ttcctcctgtttgccagtga

SEQ ID NO: 296302 - DNA, 20 bp, synthetic construct
  source 1..20: mol_type = other DNA
attcctcctgtttgccagtg

SEQ ID NO: 296303 - DNA, 20 bp, synthetic construct
  source 1..20: mol_type = other DNA
cattcctcctgtttgccagt

SEQ ID NO: 296304 - DNA, 20 bp, synthetic construct
  source 1..20: mol_type = other DNA
acattcctcctgtttgccag

SEQ ID NO: 296305 - DNA, 20 bp, synthetic construct
  source 1..20: mol_type = other DNA
cacattcctcctgtttgcca

SEQ ID NO: 296306 - DNA, 20 bp, synthetic construct
  source 1..20: mol_type = other DNA
acacattcctcctgtttgcc

SEQ ID NO: 296307 - DNA, 20 bp, synthetic construct
  source 1..20: mol_type = other DNA
cacacattcctcctgtttgc

SEQ ID NO: 296308 - DNA, 20 bp, synthetic construct
  source 1..20: mol_type = other DNA
ccacacattcctcctgtttg

SEQ ID NO: 296309 - DNA, 20 bp, synthetic construct
  source 1..20: mol_type = other DNA
gccacacattcctcctgttt

SEQ ID NO: 296310 - DNA, 20 bp, synthetic construct
  source 1..20: mol_type = other DNA
agccacacattcctcctgtt

SEQ ID NO: 296311 - DNA, 20 bp, synthetic construct
  source 1..20: mol_type = other DNA
gagccacacattcctcctgt

SEQ ID NO: 296312 - DNA, 20 bp, synthetic construct
  source 1..20: mol_type = other DNA
tgagccacacattcctcctg

SEQ ID NO: 296313 - DNA, 20 bp, synthetic construct
  source 1..20: mol_type = other DNA
atgagccacacattcctcct

SEQ ID NO: 296314 - DNA, 20 bp, synthetic construct
  source 1..20: mol_type = other DNA
catgagccacacattcctcc

SEQ ID NO: 296315 - DNA, 20 bp, synthetic construct
  source 1..20: mol_type = other DNA
acatgagccacacattcctc

SEQ ID NO: 296316 - DNA, 20 bp, synthetic construct
  source 1..20: mol_type = other DNA
gacatgagccacacattcct

SEQ ID NO: 296317 - DNA, 20 bp, synthetic construct
  source 1..20: mol_type = other DNA
agacatgagccacacattcc

SEQ ID NO: 296318 - DNA, 20 bp, synthetic construct
  source 1..20: mol_type = other DNA
cagacatgagccacacattc

SEQ ID NO: 296319 - DNA, 20 bp, synthetic construct
  source 1..20: mol_type = other DNA
ccagacatgagccacacatt

SEQ ID NO: 296320 - DNA, 20 bp, synthetic construct
  source 1..20: mol_type = other DNA
cccagacatgagccacacat

SEQ ID NO: 296321 - DNA, 20 bp, synthetic construct
  source 1..20: mol_type = other DNA
gcccagacatgagccacaca

SEQ ID NO: 296322 - DNA, 20 bp, synthetic construct
  source 1..20: mol_type = other DNA
tgcccagacatgagccacac

SEQ ID NO: 296323 - DNA, 20 bp, synthetic construct
  source 1..20: mol_type = other DNA
atgcccagacatgagccaca

SEQ ID NO: 296324 - DNA, 20 bp, synthetic construct
  source 1..20: mol_type = other DNA
gatgcccagacatgagccac

SEQ ID NO: 296325 - DNA, 20 bp, synthetic construct
  source 1..20: mol_type = other DNA
tgatgcccagacatgagcca

SEQ ID NO: 296326 - DNA, 20 bp, synthetic construct
  source 1..20: mol_type = other DNA
ctgatgcccagacatgagcc

SEQ ID NO: 296327 - DNA, 20 bp, synthetic construct
  source 1..20: mol_type = other DNA
actgatgcccagacatgagc

SEQ ID NO: 296328 - DNA, 20 bp, synthetic construct
  source 1..20: mol_type = other DNA
cactgatgcccagacatgag

SEQ ID NO: 296329 - DNA, 20 bp, synthetic construct
  source 1..20: mol_type = other DNA
ccactgatgcccagacatga

SEQ ID NO: 296330 - DNA, 20 bp, synthetic construct
  source 1..20: mol_type = other DNA
gccactgatgcccagacatg

SEQ ID NO: 296331 - DNA, 20 bp, synthetic construct
  source 1..20: mol_type = other DNA
agccactgatgcccagacat

SEQ ID NO: 296332 - DNA, 20 bp, synthetic construct
  source 1..20: mol_type = other DNA
cagccactgatgcccagaca

SEQ ID NO: 296333 - DNA, 20 bp, synthetic construct
  source 1..20: mol_type = other DNA
acagccactgatgcccagac

SEQ ID NO: 296334 - DNA, 20 bp, synthetic construct
  source 1..20: mol_type = other DNA
cacagccactgatgcccaga

SEQ ID NO: 296335 - DNA, 20 bp, synthetic construct
  source 1..20: mol_type = other DNA
ccacagccactgatgcccag

SEQ ID NO: 296336 - DNA, 20 bp, synthetic construct
  source 1..20: mol_type = other DNA
cccacagccactgatgccca

SEQ ID NO: 296337 - DNA, 20 bp, synthetic construct
  source 1..20: mol_type = other DNA
tcccacagccactgatgccc

SEQ ID NO: 296338 - DNA, 20 bp, synthetic construct
  source 1..20: mol_type = other DNA
ctcccacagccactgatgcc

SEQ ID NO: 296339 - DNA, 20 bp, synthetic construct
  source 1..20: mol_type = other DNA
tctcccacagccactgatgc

SEQ ID NO: 296340 - DNA, 20 bp, synthetic construct
  source 1..20: mol_type = other DNA
gtctcccacagccactgatg

SEQ ID NO: 296341 - DNA, 20 bp, synthetic construct
  source 1..20: mol_type = other DNA
tgtctcccacagccactgat

SEQ ID NO: 296342 - DNA, 20 bp, synthetic construct
  source 1..20: mol_type = other DNA
atgtctcccacagccactga

SEQ ID NO: 296343 - DNA, 20 bp, synthetic construct
  source 1..20: mol_type = other DNA
gatgtctcccacagccactg

SEQ ID NO: 296344 - DNA, 20 bp, synthetic construct
  source 1..20: mol_type = other DNA
ggatgtctcccacagccact

SEQ ID NO: 296345 - DNA, 20 bp, synthetic construct
  source 1..20: mol_type = other DNA
aggatgtctcccacagccac

SEQ ID NO: 296346 - DNA, 20 bp, synthetic construct
  source 1..20: mol_type = other DNA
aaggatgtctcccacagcca

SEQ ID NO: 296347 - DNA, 20 bp, synthetic construct
  source 1..20: mol_type = other DNA
caaggatgtctcccacagcc

SEQ ID NO: 296348 - DNA, 20 bp, synthetic construct
  source 1..20: mol_type = other DNA
tcaaggatgtctcccacagc

SEQ ID NO: 296349 - DNA, 20 bp, synthetic construct
  source 1..20: mol_type = other DNA
atcaaggatgtctcccacag

SEQ ID NO: 296350 - DNA, 20 bp, synthetic construct
  source 1..20: mol_type = other DNA
gatcaaggatgtctcccaca

SEQ ID NO: 296351 - DNA, 20 bp, synthetic construct
  source 1..20: mol_type = other DNA
agatcaaggatgtctcccac

SEQ ID NO: 296352 - DNA, 20 bp, synthetic construct
  source 1..20: mol_type = other DNA
aagatcaaggatgtctccca

SEQ ID NO: 296353 - DNA, 20 bp, synthetic construct
  source 1..20: mol_type = other DNA
gaagatcaaggatgtctccc

SEQ ID NO: 296354 - DNA, 20 bp, synthetic construct
  source 1..20: mol_type = other DNA
agaagatcaaggatgtctcc

SEQ ID NO: 296355 - DNA, 20 bp, synthetic construct
  source 1..20: mol_type = other DNA
gagaagatcaaggatgtctc

SEQ ID NO: 296356 - DNA, 20 bp, synthetic construct
  source 1..20: mol_type = other DNA
ggagaagatcaaggatgtct

SEQ ID NO: 296357 - DNA, 20 bp, synthetic construct
  source 1..20: mol_type = other DNA
tggagaagatcaaggatgtc

SEQ ID NO: 296358 - DNA, 20 bp, synthetic construct
  source 1..20: mol_type = other DNA
ctggagaagatcaaggatgt

SEQ ID NO: 296359 - DNA, 20 bp, synthetic construct
  source 1..20: mol_type = other DNA
gctggagaagatcaaggatg

SEQ ID NO: 296360 - DNA, 20 bp, synthetic construct
  source 1..20: mol_type = other DNA
agctggagaagatcaaggat

SEQ ID NO: 296361 - DNA, 20 bp, synthetic construct
  source 1..20: mol_type = other DNA
aagctggagaagatcaagga

SEQ ID NO: 296362 - DNA, 20 bp, synthetic construct
  source 1..20: mol_type = other DNA
gaagctggagaagatcaagg

SEQ ID NO: 296363 - DNA, 20 bp, synthetic construct
  source 1..20: mol_type = other DNA
agaagctggagaagatcaag

SEQ ID NO: 296364 - DNA, 20 bp, synthetic construct
  source 1..20: mol_type = other DNA
gagaagctggagaagatcaa

SEQ ID NO: 296365 - DNA, 20 bp, synthetic construct
  source 1..20: mol_type = other DNA
ggagaagctggagaagatca

SEQ ID NO: 296366 - DNA, 20 bp, synthetic construct
  source 1..20: mol_type = other DNA
aggagaagctggagaagatc

SEQ ID NO: 296367 - DNA, 20 bp, synthetic construct
  source 1..20: mol_type = other DNA
aaggagaagctggagaagat

SEQ ID NO: 296368 - DNA, 20 bp, synthetic construct
  source 1..20: mol_type = other DNA
gaaggagaagctggagaaga

SEQ ID NO: 296369 - DNA, 20 bp, synthetic construct
  source 1..20: mol_type = other DNA
ggaaggagaagctggagaag

SEQ ID NO: 296370 - DNA, 20 bp, synthetic construct
  source 1..20: mol_type = other DNA
tggaaggagaagctggagaa

SEQ ID NO: 296371 - DNA, 20 bp, synthetic construct
  source 1..20: mol_type = other DNA
gtggaaggagaagctggaga

SEQ ID NO: 296372 - DNA, 20 bp, synthetic construct
  source 1..20: mol_type = other DNA
tgtggaaggagaagctggag

SEQ ID NO: 296373 - DNA, 20 bp, synthetic construct
  source 1..20: mol_type = other DNA
atgtggaaggagaagctgga

SEQ ID NO: 296374 - DNA, 20 bp, synthetic construct
  source 1..20: mol_type = other DNA
aatgtggaaggagaagctgg

SEQ ID NO: 296375 - DNA, 20 bp, synthetic construct
  source 1..20: mol_type = other DNA
aaatgtggaaggagaagctg

SEQ ID NO: 296376 - DNA, 20 bp, synthetic construct
  source 1..20: mol_type = other DNA
aaaatgtggaaggagaagct

SEQ ID NO: 296377 - DNA, 20 bp, synthetic construct
  source 1..20: mol_type = other DNA
gaaaatgtggaaggagaagc

SEQ ID NO: 296378 - DNA, 20 bp, synthetic construct
  source 1..20: mol_type = other DNA
ggaaaatgtggaaggagaag

SEQ ID NO: 296379 - DNA, 20 bp, synthetic construct
  source 1..20: mol_type = other DNA
aggaaaatgtggaaggagaa

SEQ ID NO: 296380 - DNA, 20 bp, synthetic construct
  source 1..20: mol_type = other DNA
aaggaaaatgtggaaggaga

SEQ ID NO: 296381 - DNA, 20 bp, synthetic construct
  source 1..20: mol_type = other DNA
aaaggaaaatgtggaaggag

SEQ ID NO: 296382 - DNA, 20 bp, synthetic construct
  source 1..20: mol_type = other DNA
caaaggaaaatgtggaagga

SEQ ID NO: 296383 - DNA, 20 bp, synthetic construct
  source 1..20: mol_type = other DNA
gcaaaggaaaatgtggaagg

SEQ ID NO: 296384 - DNA, 20 bp, synthetic construct
  source 1..20: mol_type = other DNA
tgcaaaggaaaatgtggaag

SEQ ID NO: 296385 - DNA, 20 bp, synthetic construct
  source 1..20: mol_type = other DNA
ttgcaaaggaaaatgtggaa

SEQ ID NO: 296386 - DNA, 20 bp, synthetic construct
  source 1..20: mol_type = other DNA
attgcaaaggaaaatgtgga

SEQ ID NO: 296387 - DNA, 20 bp, synthetic construct
  source 1..20: mol_type = other DNA
gattgcaaaggaaaatgtgg

SEQ ID NO: 296388 - DNA, 20 bp, synthetic construct
  source 1..20: mol_type = other DNA
agattgcaaaggaaaatgtg

SEQ ID NO: 296389 - DNA, 20 bp, synthetic construct
  source 1..20: mol_type = other DNA
cagattgcaaaggaaaatgt

SEQ ID NO: 296390 - DNA, 20 bp, synthetic construct
  source 1..20: mol_type = other DNA
ccagattgcaaaggaaaatg

SEQ ID NO: 296391 - DNA, 20 bp, synthetic construct
  source 1..20: mol_type = other DNA
gccagattgcaaaggaaaat

SEQ ID NO: 296392 - DNA, 20 bp, synthetic construct
  source 1..20: mol_type = other DNA
tgccagattgcaaaggaaaa

SEQ ID NO: 296393 - DNA, 20 bp, synthetic construct
  source 1..20: mol_type = other DNA
ttgccagattgcaaaggaaa

SEQ ID NO: 296394 - DNA, 20 bp, synthetic construct
  source 1..20: mol_type = other DNA
attgccagattgcaaaggaa

SEQ ID NO: 296395 - DNA, 20 bp, synthetic construct
  source 1..20: mol_type = other DNA
tattgccagattgcaaagga

SEQ ID NO: 296396 - DNA, 20 bp, synthetic construct
  source 1..20: mol_type = other DNA
atattgccagattgcaaagg

SEQ ID NO: 296397 - DNA, 20 bp, synthetic construct
  source 1..20: mol_type = other DNA
gatattgccagattgcaaag

SEQ ID NO: 296398 - DNA, 20 bp, synthetic construct
  source 1..20: mol_type = other DNA
agatattgccagattgcaaa

SEQ ID NO: 296399 - DNA, 20 bp, synthetic construct
  source 1..20: mol_type = other DNA
tagatattgccagattgcaa

SEQ ID NO: 296400 - DNA, 20 bp, synthetic construct
  source 1..20: mol_type = other DNA
atagatattgccagattgca

SEQ ID NO: 296401 - DNA, 20 bp, synthetic construct
  source 1..20: mol_type = other DNA
aatagatattgccagattgc

SEQ ID NO: 296402 - DNA, 20 bp, synthetic construct
  source 1..20: mol_type = other DNA
taatagatattgccagattg

SEQ ID NO: 296403 - DNA, 20 bp, synthetic construct
  source 1..20: mol_type = other DNA
ttaatagatattgccagatt

SEQ ID NO: 296404 - DNA, 20 bp, synthetic construct
  source 1..20: mol_type = other DNA
tttaatagatattgccagat

SEQ ID NO: 296405 - DNA, 20 bp, synthetic construct
  source 1..20: mol_type = other DNA
ttttaatagatattgccaga

SEQ ID NO: 296406 - DNA, 20 bp, synthetic construct
  source 1..20: mol_type = other DNA
attttaatagatattgccag

SEQ ID NO: 296407 - DNA, 20 bp, synthetic construct
  source 1..20: mol_type = other DNA
tattttaatagatattgcca

SEQ ID NO: 296408 - DNA, 20 bp, synthetic construct
  source 1..20: mol_type = other DNA
ttattttaatagatattgcc

SEQ ID NO: 296409 - DNA, 20 bp, synthetic construct
  source 1..20: mol_type = other DNA
tttattttaatagatattgc

SEQ ID NO: 296410 - DNA, 20 bp, synthetic construct
  source 1..20: mol_type = other DNA
ttttattttaatagatattg

SEQ ID NO: 296411 - DNA, 20 bp, synthetic construct
  source 1..20: mol_type = other DNA
attttattttaatagatatt

SEQ ID NO: 296412 - DNA, 20 bp, synthetic construct
  source 1..20: mol_type = other DNA
cattttattttaatagatat

SEQ ID NO: 296413 - DNA, 20 bp, synthetic construct
  source 1..20: mol_type = other DNA
acattttattttaatagata

SEQ ID NO: 296414 - DNA, 20 bp, synthetic construct
  source 1..20: mol_type = other DNA
cacattttattttaatagat

SEQ ID NO: 296415 - DNA, 20 bp, synthetic construct
  source 1..20: mol_type = other DNA
gcacattttattttaataga

SEQ ID NO: 296416 - DNA, 20 bp, synthetic construct
  source 1..20: mol_type = other DNA
tgcacattttattttaatag

SEQ ID NO: 296417 - DNA, 20 bp, synthetic construct
  source 1..20: mol_type = other DNA
atgcacattttattttaata

SEQ ID NO: 296418 - DNA, 20 bp, synthetic construct
  source 1..20: mol_type = other DNA
catgcacattttattttaat

SEQ ID NO: 296419 - DNA, 20 bp, synthetic construct
  source 1..20: mol_type = other DNA
gcatgcacattttattttaa

SEQ ID NO: 296420 - DNA, 20 bp, synthetic construct
  source 1..20: mol_type = other DNA
ggcatgcacattttatttta

SEQ ID NO: 296421 - DNA, 20 bp, synthetic construct
  source 1..20: mol_type = other DNA
aggcatgcacattttatttt

SEQ ID NO: 296422 - DNA, 20 bp, synthetic construct
  source 1..20: mol_type = other DNA
aaggcatgcacattttattt

SEQ ID NO: 296423 - DNA, 20 bp, synthetic construct
  source 1..20: mol_type = other DNA
aaaggcatgcacattttatt

SEQ ID NO: 296424 - DNA, 20 bp, synthetic construct
  source 1..20: mol_type = other DNA
aaaaggcatgcacattttat

SEQ ID NO: 296425 - DNA, 20 bp, synthetic construct
  source 1..20: mol_type = other DNA
caaaaggcatgcacatttta

SEQ ID NO: 296426 - DNA, 20 bp, synthetic construct
  source 1..20: mol_type = other DNA
tcaaaaggcatgcacatttt

SEQ ID NO: 296427 - DNA, 20 bp, synthetic construct
  source 1..20: mol_type = other DNA
gtcaaaaggcatgcacattt

SEQ ID NO: 296428 - DNA, 20 bp, synthetic construct
  source 1..20: mol_type = other DNA
ggtcaaaaggcatgcacatt

SEQ ID NO: 296429 - DNA, 20 bp, synthetic construct
  source 1..20: mol_type = other DNA
aggtcaaaaggcatgcacat

SEQ ID NO: 296430 - DNA, 20 bp, synthetic construct
  source 1..20: mol_type = other DNA
taggtcaaaaggcatgcaca

SEQ ID NO: 296431 - DNA, 20 bp, synthetic construct
  source 1..20: mol_type = other DNA
ttaggtcaaaaggcatgcac

SEQ ID NO: 296432 - DNA, 20 bp, synthetic construct
  source 1..20: mol_type = other DNA
cttaggtcaaaaggcatgca

SEQ ID NO: 296433 - DNA, 20 bp, synthetic construct
  source 1..20: mol_type = other DNA
tcttaggtcaaaaggcatgc

SEQ ID NO: 296434 - DNA, 20 bp, synthetic construct
  source 1..20: mol_type = other DNA
ctcttaggtcaaaaggcatg

SEQ ID NO: 296435 - DNA, 20 bp, synthetic construct
  source 1..20: mol_type = other DNA
gctcttaggtcaaaaggcat

SEQ ID NO: 296436 - DNA, 20 bp, synthetic construct
  source 1..20: mol_type = other DNA
agctcttaggtcaaaaggca

SEQ ID NO: 296437 - DNA, 20 bp, synthetic construct
  source 1..20: mol_type = other DNA
aagctcttaggtcaaaaggc

SEQ ID NO: 296438 - DNA, 20 bp, synthetic construct
  source 1..20: mol_type = other DNA
gaagctcttaggtcaaaagg

SEQ ID NO: 296439 - DNA, 20 bp, synthetic construct
  source 1..20: mol_type = other DNA
tgaagctcttaggtcaaaag

SEQ ID NO: 296440 - DNA, 20 bp, synthetic construct
  source 1..20: mol_type = other DNA
gtgaagctcttaggtcaaaa

SEQ ID NO: 296441 - DNA, 20 bp, synthetic construct
  source 1..20: mol_type = other DNA
agtgaagctcttaggtcaaa

SEQ ID NO: 296442 - DNA, 20 bp, synthetic construct
  source 1..20: mol_type = other DNA
aagtgaagctcttaggtcaa

SEQ ID NO: 296443 - DNA, 20 bp, synthetic construct
  source 1..20: mol_type = other DNA
gaagtgaagctcttaggtca

SEQ ID NO: 296444 - DNA, 20 bp, synthetic construct
  source 1..20: mol_type = other DNA
agaagtgaagctcttaggtc

SEQ ID NO: 296445 - DNA, 20 bp, synthetic construct
  source 1..20: mol_type = other DNA
tagaagtgaagctcttaggt

SEQ ID NO: 296446 - DNA, 20 bp, synthetic construct
  source 1..20: mol_type = other DNA
ctagaagtgaagctcttagg

SEQ ID NO: 296447 - DNA, 20 bp, synthetic construct
  source 1..20: mol_type = other DNA
cctagaagtgaagctcttag

SEQ ID NO: 296448 - DNA, 20 bp, synthetic construct
  source 1..20: mol_type = other DNA
tcctagaagtgaagctctta

SEQ ID NO: 296449 - DNA, 20 bp, synthetic construct
  source 1..20: mol_type = other DNA
gtcctagaagtgaagctctt

SEQ ID NO: 296450 - DNA, 20 bp, synthetic construct
  source 1..20: mol_type = other DNA
ggtcctagaagtgaagctct

SEQ ID NO: 296451 - DNA, 20 bp, synthetic construct
  source 1..20: mol_type = other DNA
gggtcctagaagtgaagctc

SEQ ID NO: 296452 - DNA, 20 bp, synthetic construct
  source 1..20: mol_type = other DNA
tgggtcctagaagtgaagct

SEQ ID NO: 296453 - DNA, 20 bp, synthetic construct
  source 1..20: mol_type = other DNA
gtgggtcctagaagtgaagc

SEQ ID NO: 296454 - DNA, 20 bp, synthetic construct
  source 1..20: mol_type = other DNA
agtgggtcctagaagtgaag

SEQ ID NO: 296455 - DNA, 20 bp, synthetic construct
  source 1..20: mol_type = other DNA
aagtgggtcctagaagtgaa

SEQ ID NO: 296456 - DNA, 20 bp, synthetic construct
  source 1..20: mol_type = other DNA
taagtgggtcctagaagtga

SEQ ID NO: 296457 - DNA, 20 bp, synthetic construct
  source 1..20: mol_type = other DNA
gtaagtgggtcctagaagtg

SEQ ID NO: 296458 - DNA, 20 bp, synthetic construct
  source 1..20: mol_type = other DNA
tgtaagtgggtcctagaagt

SEQ ID NO: 296459 - DNA, 20 bp, synthetic construct
  source 1..20: mol_type = other DNA
gtgtaagtgggtcctagaag

SEQ ID NO: 296460 - DNA, 20 bp, synthetic construct
  source 1..20: mol_type = other DNA
cgtgtaagtgggtcctagaa

SEQ ID NO: 296461 - DNA, 20 bp, synthetic construct
  source 1..20: mol_type = other DNA
acgtgtaagtgggtcctaga

SEQ ID NO: 296462 - DNA, 20 bp, synthetic construct
  source 1..20: mol_type = other DNA
cacgtgtaagtgggtcctag

SEQ ID NO: 296463 - DNA, 20 bp, synthetic construct
  source 1..20: mol_type = other DNA
acacgtgtaagtgggtccta

SEQ ID NO: 296464 - DNA, 20 bp, synthetic construct
  source 1..20: mol_type = other DNA
cacacgtgtaagtgggtcct

SEQ ID NO: 296465 - DNA, 20 bp, synthetic construct
  source 1..20: mol_type = other DNA
acacacgtgtaagtgggtcc

SEQ ID NO: 296466 - DNA, 20 bp, synthetic construct
  source 1..20: mol_type = other DNA
cacacacgtgtaagtgggtc

SEQ ID NO: 296467 - DNA, 20 bp, synthetic construct
  source 1..20: mol_type = other DNA
tcacacacgtgtaagtgggt

SEQ ID NO: 296468 - DNA, 20 bp, synthetic construct
  source 1..20: mol_type = other DNA
gtcacacacgtgtaagtggg

SEQ ID NO: 296469 - DNA, 20 bp, synthetic construct
  source 1..20: mol_type = other DNA
tgtcacacacgtgtaagtgg

SEQ ID NO: 296470 - DNA, 20 bp, synthetic construct
  source 1..20: mol_type = other DNA
atgtcacacacgtgtaagtg

SEQ ID NO: 296471 - DNA, 20 bp, synthetic construct
  source 1..20: mol_type = other DNA
catgtcacacacgtgtaagt

SEQ ID NO: 296472 - DNA, 20 bp, synthetic construct
  source 1..20: mol_type = other DNA
tcatgtcacacacgtgtaag

SEQ ID NO: 296473 - DNA, 20 bp, synthetic construct
  source 1..20: mol_type = other DNA
atcatgtcacacacgtgtaa

SEQ ID NO: 296474 - DNA, 20 bp, synthetic construct
  source 1..20: mol_type = other DNA
catcatgtcacacacgtgta

SEQ ID NO: 296475 - DNA, 20 bp, synthetic construct
  source 1..20: mol_type = other DNA
acatcatgtcacacacgtgt

SEQ ID NO: 296476 - DNA, 20 bp, synthetic construct
  source 1..20: mol_type = other DNA
aacatcatgtcacacacgtg

SEQ ID NO: 296477 - DNA, 20 bp, synthetic construct
  source 1..20: mol_type = other DNA
gaacatcatgtcacacacgt

SEQ ID NO: 296478 - DNA, 20 bp, synthetic construct
  source 1..20: mol_type = other DNA
tgaacatcatgtcacacacg

SEQ ID NO: 296479 - DNA, 20 bp, synthetic construct
  source 1..20: mol_type = other DNA
atgaacatcatgtcacacac

SEQ ID NO: 296480 - DNA, 20 bp, synthetic construct
  source 1..20: mol_type = other DNA
tatgaacatcatgtcacaca

SEQ ID NO: 296481 - DNA, 20 bp, synthetic construct
  source 1..20: mol_type = other DNA
gtatgaacatcatgtcacac

SEQ ID NO: 296482 - DNA, 20 bp, synthetic construct
  source 1..20: mol_type = other DNA
cgtatgaacatcatgtcaca

SEQ ID NO: 296483 - DNA, 20 bp, synthetic construct
  source 1..20: mol_type = other DNA
ccgtatgaacatcatgtcac

SEQ ID NO: 296484 - DNA, 20 bp, synthetic construct
  source 1..20: mol_type = other DNA
cccgtatgaacatcatgtca

SEQ ID NO: 296485 - DNA, 20 bp, synthetic construct
  source 1..20: mol_type = other DNA
acccgtatgaacatcatgtc

SEQ ID NO: 296486 - DNA, 20 bp, synthetic construct
  source 1..20: mol_type = other DNA
aacccgtatgaacatcatgt

SEQ ID NO: 296487 - DNA, 20 bp, synthetic construct
  source 1..20: mol_type = other DNA
aaacccgtatgaacatcatg

SEQ ID NO: 296488 - DNA, 20 bp, synthetic construct
  source 1..20: mol_type = other DNA
taaacccgtatgaacatcat

SEQ ID NO: 296489 - DNA, 20 bp, synthetic construct
  source 1..20: mol_type = other DNA
ataaacccgtatgaacatca

SEQ ID NO: 296490 - DNA, 20 bp, synthetic construct
  source 1..20: mol_type = other DNA
aataaacccgtatgaacatc

SEQ ID NO: 296491 - DNA, 20 bp, synthetic construct
  source 1..20: mol_type = other DNA
aaataaacccgtatgaacat

SEQ ID NO: 296492 - DNA, 20 bp, synthetic construct
  source 1..20: mol_type = other DNA
taaataaacccgtatgaaca

SEQ ID NO: 296493 - DNA, 20 bp, synthetic construct
  source 1..20: mol_type = other DNA
ataaataaacccgtatgaac

SEQ ID NO: 296494 - DNA, 20 bp, synthetic construct
  source 1..20: mol_type = other DNA
gataaataaacccgtatgaa

SEQ ID NO: 296495 - DNA, 20 bp, synthetic construct
  source 1..20: mol_type = other DNA
agataaataaacccgtatga

SEQ ID NO: 296496 - DNA, 20 bp, synthetic construct
  source 1..20: mol_type = other DNA
cagataaataaacccgtatg

SEQ ID NO: 296497 - DNA, 20 bp, synthetic construct
  source 1..20: mol_type = other DNA
tcagataaataaacccgtat

SEQ ID NO: 296498 - DNA, 20 bp, synthetic construct
  source 1..20: mol_type = other DNA
ctcagataaataaacccgta

SEQ ID NO: 296499 - DNA, 20 bp, synthetic construct
  source 1..20: mol_type = other DNA
cctcagataaataaacccgt

SEQ ID NO: 296500 - DNA, 20 bp, synthetic construct
  source 1..20: mol_type = other DNA
acctcagataaataaacccg

SEQ ID NO: 296501 - DNA, 20 bp, synthetic construct
  source 1..20: mol_type = other DNA
aacctcagataaataaaccc

SEQ ID NO: 296502 - DNA, 20 bp, synthetic construct
  source 1..20: mol_type = other DNA
caacctcagataaataaacc

SEQ ID NO: 296503 - DNA, 20 bp, synthetic construct
  source 1..20: mol_type = other DNA
acaacctcagataaataaac

SEQ ID NO: 296504 - DNA, 20 bp, synthetic construct
  source 1..20: mol_type = other DNA
aacaacctcagataaataaa

SEQ ID NO: 296505 - DNA, 20 bp, synthetic construct
  source 1..20: mol_type = other DNA
gaacaacctcagataaataa

SEQ ID NO: 296506 - DNA, 20 bp, synthetic construct
  source 1..20: mol_type = other DNA
tgaacaacctcagataaata

SEQ ID NO: 296507 - DNA, 20 bp, synthetic construct
  source 1..20: mol_type = other DNA
atgaacaacctcagataaat

SEQ ID NO: 296508 - DNA, 20 bp, synthetic construct
  source 1..20: mol_type = other DNA
tatgaacaacctcagataaa

SEQ ID NO: 296509 - DNA, 20 bp, synthetic construct
  source 1..20: mol_type = other DNA
gtatgaacaacctcagataa

SEQ ID NO: 296510 - DNA, 20 bp, synthetic construct
  source 1..20: mol_type = other DNA
tgtatgaacaacctcagata

SEQ ID NO: 296511 - DNA, 20 bp, synthetic construct
  source 1..20: mol_type = other DNA
gtgtatgaacaacctcagat

SEQ ID NO: 296512 - DNA, 20 bp, synthetic construct
  source 1..20: mol_type = other DNA
tgtgtatgaacaacctcaga

SEQ ID NO: 296513 - DNA, 20 bp, synthetic construct
  source 1..20: mol_type = other DNA
gtgtgtatgaacaacctcag

SEQ ID NO: 296514 - DNA, 20 bp, synthetic construct
  source 1..20: mol_type = other DNA
ggtgtgtatgaacaacctca

SEQ ID NO: 296515 - DNA, 20 bp, synthetic construct
  source 1..20: mol_type = other DNA
tggtgtgtatgaacaacctc

SEQ ID NO: 296516 - DNA, 20 bp, synthetic construct
  source 1..20: mol_type = other DNA
atggtgtgtatgaacaacct

SEQ ID NO: 296517 - DNA, 20 bp, synthetic construct
  source 1..20: mol_type = other DNA
aatggtgtgtatgaacaacc

SEQ ID NO: 296518 - DNA, 20 bp, synthetic construct
  source 1..20: mol_type = other DNA
caatggtgtgtatgaacaac

SEQ ID NO: 296519 - DNA, 20 bp, synthetic construct
  source 1..20: mol_type = other DNA
gcaatggtgtgtatgaacaa

SEQ ID NO: 296520 - DNA, 20 bp, synthetic construct
  source 1..20: mol_type = other DNA
ggcaatggtgtgtatgaaca

SEQ ID NO: 296521 - DNA, 20 bp, synthetic construct
  source 1..20: mol_type = other DNA
aggcaatggtgtgtatgaac

SEQ ID NO: 296522 - DNA, 20 bp, synthetic construct
  source 1..20: mol_type = other DNA
caggcaatggtgtgtatgaa

SEQ ID NO: 296523 - DNA, 20 bp, synthetic construct
  source 1..20: mol_type = other DNA
acaggcaatggtgtgtatga

SEQ ID NO: 296524 - DNA, 20 bp, synthetic construct
  source 1..20: mol_type = other DNA
tacaggcaatggtgtgtatg

SEQ ID NO: 296525 - DNA, 20 bp, synthetic construct
  source 1..20: mol_type = other DNA
ttacaggcaatggtgtgtat

SEQ ID NO: 296526 - DNA, 20 bp, synthetic construct
  source 1..20: mol_type = other DNA
attacaggcaatggtgtgta

SEQ ID NO: 296527 - DNA, 20 bp, synthetic construct
  source 1..20: mol_type = other DNA
gattacaggcaatggtgtgt

SEQ ID NO: 296528 - DNA, 20 bp, synthetic construct
  source 1..20: mol_type = other DNA
tgattacaggcaatggtgtg

SEQ ID NO: 296529 - DNA, 20 bp, synthetic construct
  source 1..20: mol_type = other DNA
gtgattacaggcaatggtgt

SEQ ID NO: 296530 - DNA, 20 bp, synthetic construct
  source 1..20: mol_type = other DNA
agtgattacaggcaatggtg

SEQ ID NO: 296531 - DNA, 20 bp, synthetic construct
  source 1..20: mol_type = other DNA
tagtgattacaggcaatggt

SEQ ID NO: 296532 - DNA, 20 bp, synthetic construct
  source 1..20: mol_type = other DNA
ttagtgattacaggcaatgg

SEQ ID NO: 296533 - DNA, 20 bp, synthetic construct
  source 1..20: mol_type = other DNA
tttagtgattacaggcaatg

SEQ ID NO: 296534 - DNA, 20 bp, synthetic construct
  source 1..20: mol_type = other DNA
ctttagtgattacaggcaat

SEQ ID NO: 296535 - DNA, 20 bp, synthetic construct
  source 1..20: mol_type = other DNA
cctttagtgattacaggcaa

SEQ ID NO: 296536 - DNA, 20 bp, synthetic construct
  source 1..20: mol_type = other DNA
gcctttagtgattacaggca

SEQ ID NO: 296537 - DNA, 20 bp, synthetic construct
  source 1..20: mol_type = other DNA
cgcctttagtgattacaggc

SEQ ID NO: 296538 - DNA, 20 bp, synthetic construct
  source 1..20: mol_type = other DNA
ccgcctttagtgattacagg

SEQ ID NO: 296539 - DNA, 20 bp, synthetic construct
  source 1..20: mol_type = other DNA
cccgcctttagtgattacag

SEQ ID NO: 296540 - DNA, 20 bp, synthetic construct
  source 1..20: mol_type = other DNA
tcccgcctttagtgattaca

SEQ ID NO: 296541 - DNA, 20 bp, synthetic construct
  source 1..20: mol_type = other DNA
ctcccgcctttagtgattac

SEQ ID NO: 296542 - DNA, 20 bp, synthetic construct
  source 1..20: mol_type = other DNA
gctcccgcctttagtgatta

SEQ ID NO: 296543 - DNA, 20 bp, synthetic construct
  source 1..20: mol_type = other DNA
tgctcccgcctttagtgatt

SEQ ID NO: 296544 - DNA, 20 bp, synthetic construct
  source 1..20: mol_type = other DNA
ctgctcccgcctttagtgat

SEQ ID NO: 296545 - DNA, 20 bp, synthetic construct
  source 1..20: mol_type = other DNA
gctgctcccgcctttagtga

SEQ ID NO: 296546 - DNA, 20 bp, synthetic construct
  source 1..20: mol_type = other DNA
ggctgctcccgcctttagtg

SEQ ID NO: 296547 - DNA, 20 bp, synthetic construct
  source 1..20: mol_type = other DNA
aggctgctcccgcctttagt

SEQ ID NO: 296548 - DNA, 20 bp, synthetic construct
  source 1..20: mol_type = other DNA
taggctgctcccgcctttag

SEQ ID NO: 296549 - DNA, 20 bp, synthetic construct
  source 1..20: mol_type = other DNA
gtaggctgctcccgccttta

SEQ ID NO: 296550 - DNA, 20 bp, synthetic construct
  source 1..20: mol_type = other DNA
tgtaggctgctcccgccttt

SEQ ID NO: 296551 - DNA, 20 bp, synthetic construct
  source 1..20: mol_type = other DNA
gtgtaggctgctcccgcctt

SEQ ID NO: 296552 - DNA, 20 bp, synthetic construct
  source 1..20: mol_type = other DNA
tgtgtaggctgctcccgcct

SEQ ID NO: 296553 - DNA, 20 bp, synthetic construct
  source 1..20: mol_type = other DNA
atgtgtaggctgctcccgcc

SEQ ID NO: 296554 - DNA, 20 bp, synthetic construct
  source 1..20: mol_type = other DNA
gatgtgtaggctgctcccgc

SEQ ID NO: 296555 - DNA, 20 bp, synthetic construct
  source 1..20: mol_type = other DNA
ggatgtgtaggctgctcccg

SEQ ID NO: 296556 - DNA, 20 bp, synthetic construct
  source 1..20: mol_type = other DNA
tggatgtgtaggctgctccc

SEQ ID NO: 296557 - DNA, 20 bp, synthetic construct
  source 1..20: mol_type = other DNA
atggatgtgtaggctgctcc

SEQ ID NO: 296558 - DNA, 20 bp, synthetic construct
  source 1..20: mol_type = other DNA
gatggatgtgtaggctgctc

SEQ ID NO: 296559 - DNA, 20 bp, synthetic construct
  source 1..20: mol_type = other DNA
ggatggatgtgtaggctgct

SEQ ID NO: 296560 - DNA, 20 bp, synthetic construct
  source 1..20: mol_type = other DNA
tggatggatgtgtaggctgc

SEQ ID NO: 296561 - DNA, 20 bp, synthetic construct
  source 1..20: mol_type = other DNA
gtggatggatgtgtaggctg

SEQ ID NO: 296562 - DNA, 20 bp, synthetic construct
  source 1..20: mol_type = other DNA
tgtggatggatgtgtaggct

SEQ ID NO: 296563 - DNA, 20 bp, synthetic construct
  source 1..20: mol_type = other DNA
ctgtggatggatgtgtaggc

SEQ ID NO: 296564 - DNA, 20 bp, synthetic construct
  source 1..20: mol_type = other DNA
tctgtggatggatgtgtagg

SEQ ID NO: 296565 - DNA, 20 bp, synthetic construct
  source 1..20: mol_type = other DNA
ctctgtggatggatgtgtag

SEQ ID NO: 296566 - DNA, 20 bp, synthetic construct
  source 1..20: mol_type = other DNA
cctctgtggatggatgtgta

SEQ ID NO: 296567 - DNA, 20 bp, synthetic construct
  source 1..20: mol_type = other DNA
tcctctgtggatggatgtgt

SEQ ID NO: 296568 - DNA, 20 bp, synthetic construct
  source 1..20: mol_type = other DNA
ctcctctgtggatggatgtg

SEQ ID NO: 296569 - DNA, 20 bp, synthetic construct
  source 1..20: mol_type = other DNA
actcctctgtggatggatgt

SEQ ID NO: 296570 - DNA, 20 bp, synthetic construct
  source 1..20: mol_type = other DNA
tactcctctgtggatggatg

SEQ ID NO: 296571 - DNA, 20 bp, synthetic construct
  source 1..20: mol_type = other DNA
ctactcctctgtggatggat

SEQ ID NO: 296572 - DNA, 20 bp, synthetic construct
  source 1..20: mol_type = other DNA
tctactcctctgtggatgga

SEQ ID NO: 296573 - DNA, 20 bp, synthetic construct
  source 1..20: mol_type = other DNA
atctactcctctgtggatgg

SEQ ID NO: 296574 - DNA, 20 bp, synthetic construct
  source 1..20: mol_type = other DNA
catctactcctctgtggatg

SEQ ID NO: 296575 - DNA, 20 bp, synthetic construct
  source 1..20: mol_type = other DNA
gcatctactcctctgtggat

SEQ ID NO: 296576 - DNA, 20 bp, synthetic construct
  source 1..20: mol_type = other DNA
ggcatctactcctctgtgga

SEQ ID NO: 296577 - DNA, 20 bp, synthetic construct
  source 1..20: mol_type = other DNA
aggcatctactcctctgtgg

SEQ ID NO: 296578 - DNA, 20 bp, synthetic construct
  source 1..20: mol_type = other DNA
aaggcatctactcctctgtg

SEQ ID NO: 296579 - DNA, 20 bp, synthetic construct
  source 1..20: mol_type = other DNA
aaaggcatctactcctctgt

SEQ ID NO: 296580 - DNA, 20 bp, synthetic construct
  source 1..20: mol_type = other DNA
aaaaggcatctactcctctg

SEQ ID NO: 296581 - DNA, 20 bp, synthetic construct
  source 1..20: mol_type = other DNA
caaaaggcatctactcctct

SEQ ID NO: 296582 - DNA, 20 bp, synthetic construct
  source 1..20: mol_type = other DNA
ccaaaaggcatctactcctc

SEQ ID NO: 296583 - DNA, 20 bp, synthetic construct
  source 1..20: mol_type = other DNA
accaaaaggcatctactcct

SEQ ID NO: 296584 - DNA, 20 bp, synthetic construct
  source 1..20: mol_type = other DNA
taccaaaaggcatctactcc

SEQ ID NO: 296585 - DNA, 20 bp, synthetic construct
  source 1..20: mol_type = other DNA
gtaccaaaaggcatctactc

SEQ ID NO: 296586 - DNA, 20 bp, synthetic construct
  source 1..20: mol_type = other DNA
tgtaccaaaaggcatctact

SEQ ID NO: 296587 - DNA, 20 bp, synthetic construct
  source 1..20: mol_type = other DNA
atgtaccaaaaggcatctac

SEQ ID NO: 296588 - DNA, 20 bp, synthetic construct
  source 1..20: mol_type = other DNA
gatgtaccaaaaggcatcta

SEQ ID NO: 296589 - DNA, 20 bp, synthetic construct
  source 1..20: mol_type = other DNA
ggatgtaccaaaaggcatct

SEQ ID NO: 296590 - DNA, 20 bp, synthetic construct
  source 1..20: mol_type = other DNA
cggatgtaccaaaaggcatc

SEQ ID NO: 296591 - DNA, 20 bp, synthetic construct
  source 1..20: mol_type = other DNA
acggatgtaccaaaaggcat

SEQ ID NO: 296592 - DNA, 20 bp, synthetic construct
  source 1..20: mol_type = other DNA
cacggatgtaccaaaaggca

SEQ ID NO: 296593 - DNA, 20 bp, synthetic construct
  source 1..20: mol_type = other DNA
ccacggatgtaccaaaaggc

SEQ ID NO: 296594 - DNA, 20 bp, synthetic construct
  source 1..20: mol_type = other DNA
gccacggatgtaccaaaagg

SEQ ID NO: 296595 - DNA, 20 bp, synthetic construct
  source 1..20: mol_type = other DNA
cgccacggatgtaccaaaag

SEQ ID NO: 296596 - DNA, 20 bp, synthetic construct
  source 1..20: mol_type = other DNA
tcgccacggatgtaccaaaa

SEQ ID NO: 296597 - DNA, 20 bp, synthetic construct
  source 1..20: mol_type = other DNA
gtcgccacggatgtaccaaa

SEQ ID NO: 296598 - DNA, 20 bp, synthetic construct
  source 1..20: mol_type = other DNA
cgtcgccacggatgtaccaa

SEQ ID NO: 296599 - DNA, 20 bp, synthetic construct
  source 1..20: mol_type = other DNA
ccgtcgccacggatgtacca

SEQ ID NO: 296600 - DNA, 20 bp, synthetic construct
  source 1..20: mol_type = other DNA
tccgtcgccacggatgtacc

SEQ ID NO: 296601 - DNA, 20 bp, synthetic construct
  source 1..20: mol_type = other DNA
ttccgtcgccacggatgtac

SEQ ID NO: 296602 - DNA, 20 bp, synthetic construct
  source 1..20: mol_type = other DNA
attccgtcgccacggatgta

SEQ ID NO: 296603 - DNA, 20 bp, synthetic construct
  source 1..20: mol_type = other DNA
tattccgtcgccacggatgt

SEQ ID NO: 296604 - DNA, 20 bp, synthetic construct
  source 1..20: mol_type = other DNA
gtattccgtcgccacggatg

SEQ ID NO: 296605 - DNA, 20 bp, synthetic construct
  source 1..20: mol_type = other DNA
agtattccgtcgccacggat

SEQ ID NO: 296606 - DNA, 20 bp, synthetic construct
  source 1..20: mol_type = other DNA
tagtattccgtcgccacgga

SEQ ID NO: 296607 - DNA, 20 bp, synthetic construct
  source 1..20: mol_type = other DNA
ttagtattccgtcgccacgg

SEQ ID NO: 296608 - DNA, 20 bp, synthetic construct
  source 1..20: mol_type = other DNA
cttagtattccgtcgccacg

SEQ ID NO: 296609 - DNA, 20 bp, synthetic construct
  source 1..20: mol_type = other DNA
gcttagtattccgtcgccac

SEQ ID NO: 296610 - DNA, 20 bp, synthetic construct
  source 1..20: mol_type = other DNA
tgcttagtattccgtcgcca

SEQ ID NO: 296611 - DNA, 20 bp, synthetic construct
  source 1..20: mol_type = other DNA
ctgcttagtattccgtcgcc

SEQ ID NO: 296612 - DNA, 20 bp, synthetic construct
  source 1..20: mol_type = other DNA
gctgcttagtattccgtcgc

SEQ ID NO: 296613 - DNA, 20 bp, synthetic construct
  source 1..20: mol_type = other DNA
ggctgcttagtattccgtcg

SEQ ID NO: 296614 - DNA, 20 bp, synthetic construct
  source 1..20: mol_type = other DNA
aggctgcttagtattccgtc

SEQ ID NO: 296615 - DNA, 20 bp, synthetic construct
  source 1..20: mol_type = other DNA
caggctgcttagtattccgt

SEQ ID NO: 296616 - DNA, 20 bp, synthetic construct
  source 1..20: mol_type = other DNA
acaggctgcttagtattccg

SEQ ID NO: 296617 - DNA, 20 bp, synthetic construct
  source 1..20: mol_type = other DNA
cacaggctgcttagtattcc

SEQ ID NO: 296618 - DNA, 20 bp, synthetic construct
  source 1..20: mol_type = other DNA
acacaggctgcttagtattc

SEQ ID NO: 296619 - DNA, 20 bp, synthetic construct
  source 1..20: mol_type = other DNA
tacacaggctgcttagtatt

SEQ ID NO: 296620 - DNA, 20 bp, synthetic construct
  source 1..20: mol_type = other DNA
atacacaggctgcttagtat

SEQ ID NO: 296621 - DNA, 20 bp, synthetic construct
  source 1..20: mol_type = other DNA
gatacacaggctgcttagta

SEQ ID NO: 296622 - DNA, 20 bp, synthetic construct
  source 1..20: mol_type = other DNA
agatacacaggctgcttagt

SEQ ID NO: 296623 - DNA, 20 bp, synthetic construct
  source 1..20: mol_type = other DNA
tagatacacaggctgcttag

SEQ ID NO: 296624 - DNA, 20 bp, synthetic construct
  source 1..20: mol_type = other DNA
atagatacacaggctgctta

SEQ ID NO: 296625 - DNA, 20 bp, synthetic construct
  source 1..20: mol_type = other DNA
tatagatacacaggctgctt

SEQ ID NO: 296626 - DNA, 20 bp, synthetic construct
  source 1..20: mol_type = other DNA
gtatagatacacaggctgct

SEQ ID NO: 296627 - DNA, 20 bp, synthetic construct
  source 1..20: mol_type = other DNA
tgtatagatacacaggctgc

SEQ ID NO: 296628 - DNA, 20 bp, synthetic construct
  source 1..20: mol_type = other DNA
gtgtatagatacacaggctg

SEQ ID NO: 296629 - DNA, 20 bp, synthetic construct
  source 1..20: mol_type = other DNA
agtgtatagatacacaggct

SEQ ID NO: 296630 - DNA, 20 bp, synthetic construct
  source 1..20: mol_type = other DNA
gagtgtatagatacacaggc

SEQ ID NO: 296631 - DNA, 20 bp, synthetic construct
  source 1..20: mol_type = other DNA
tgagtgtatagatacacagg

SEQ ID NO: 296632 - DNA, 20 bp, synthetic construct
  source 1..20: mol_type = other DNA
gtgagtgtatagatacacag

SEQ ID NO: 296633 - DNA, 20 bp, synthetic construct
  source 1..20: mol_type = other DNA
tgtgagtgtatagatacaca

SEQ ID NO: 296634 - DNA, 20 bp, synthetic construct
  source 1..20: mol_type = other DNA
gtgtgagtgtatagatacac

SEQ ID NO: 296635 - DNA, 20 bp, synthetic construct
  source 1..20: mol_type = other DNA
cgtgtgagtgtatagataca

SEQ ID NO: 296636 - DNA, 20 bp, synthetic construct
  source 1..20: mol_type = other DNA
acgtgtgagtgtatagatac

SEQ ID NO: 296637 - DNA, 20 bp, synthetic construct
  source 1..20: mol_type = other DNA
cacgtgtgagtgtatagata

SEQ ID NO: 296638 - DNA, 20 bp, synthetic construct
  source 1..20: mol_type = other DNA
acacgtgtgagtgtatagat

SEQ ID NO: 296639 - DNA, 20 bp, synthetic construct
  source 1..20: mol_type = other DNA
aacacgtgtgagtgtataga

SEQ ID NO: 296640 - DNA, 20 bp, synthetic construct
  source 1..20: mol_type = other DNA
aaacacgtgtgagtgtatag

SEQ ID NO: 296641 - DNA, 20 bp, synthetic construct
  source 1..20: mol_type = other DNA
caaacacgtgtgagtgtata

SEQ ID NO: 296642 - DNA, 20 bp, synthetic construct
  source 1..20: mol_type = other DNA
acaaacacgtgtgagtgtat

SEQ ID NO: 296643 - DNA, 20 bp, synthetic construct
  source 1..20: mol_type = other DNA
aacaaacacgtgtgagtgta

SEQ ID NO: 296644 - DNA, 20 bp, synthetic construct
  source 1..20: mol_type = other DNA
aaacaaacacgtgtgagtgt

SEQ ID NO: 296645 - DNA, 20 bp, synthetic construct
  source 1..20: mol_type = other DNA
taaacaaacacgtgtgagtg

SEQ ID NO: 296646 - DNA, 20 bp, synthetic construct
  source 1..20: mol_type = other DNA
ataaacaaacacgtgtgagt

SEQ ID NO: 296647 - DNA, 20 bp, synthetic construct
  source 1..20: mol_type = other DNA
cataaacaaacacgtgtgag

SEQ ID NO: 296648 - DNA, 20 bp, synthetic construct
  source 1..20: mol_type = other DNA
acataaacaaacacgtgtga

SEQ ID NO: 296649 - DNA, 20 bp, synthetic construct
  source 1..20: mol_type = other DNA
cacataaacaaacacgtgtg

SEQ ID NO: 296650 - DNA, 20 bp, synthetic construct
  source 1..20: mol_type = other DNA
acacataaacaaacacgtgt

SEQ ID NO: 296651 - DNA, 20 bp, synthetic construct
  source 1..20: mol_type = other DNA
cacacataaacaaacacgtg

SEQ ID NO: 296652 - DNA, 20 bp, synthetic construct
  source 1..20: mol_type = other DNA
ccacacataaacaaacacgt

SEQ ID NO: 296653 - DNA, 20 bp, synthetic construct
  source 1..20: mol_type = other DNA
tccacacataaacaaacacg

SEQ ID NO: 296654 - DNA, 20 bp, synthetic construct
  source 1..20: mol_type = other DNA
ttccacacataaacaaacac

SEQ ID NO: 296655 - DNA, 20 bp, synthetic construct
  source 1..20: mol_type = other DNA
attccacacataaacaaaca

SEQ ID NO: 296656 - DNA, 20 bp, synthetic construct
  source 1..20: mol_type = other DNA
tattccacacataaacaaac

SEQ ID NO: 296657 - DNA, 20 bp, synthetic construct
  source 1..20: mol_type = other DNA
atattccacacataaacaaa

SEQ ID NO: 296658 - DNA, 20 bp, synthetic construct
  source 1..20: mol_type = other DNA
gatattccacacataaacaa

SEQ ID NO: 296659 - DNA, 20 bp, synthetic construct
  source 1..20: mol_type = other DNA
agatattccacacataaaca

SEQ ID NO: 296660 - DNA, 20 bp, synthetic construct
  source 1..20: mol_type = other DNA
gagatattccacacataaac

SEQ ID NO: 296661 - DNA, 20 bp, synthetic construct
  source 1..20: mol_type = other DNA
agagatattccacacataaa

SEQ ID NO: 296662 - DNA, 20 bp, synthetic construct
  source 1..20: mol_type = other DNA
cagagatattccacacataa

SEQ ID NO: 296663 - DNA, 20 bp, synthetic construct
  source 1..20: mol_type = other DNA
ccagagatattccacacata

SEQ ID NO: 296664 - DNA, 20 bp, synthetic construct
  source 1..20: mol_type = other DNA
tccagagatattccacacat

SEQ ID NO: 296665 - DNA, 20 bp, synthetic construct
  source 1..20: mol_type = other DNA
ctccagagatattccacaca

SEQ ID NO: 296666 - DNA, 20 bp, synthetic construct
  source 1..20: mol_type = other DNA
cctccagagatattccacac

SEQ ID NO: 296667 - DNA, 20 bp, synthetic construct
  source 1..20: mol_type = other DNA
ccctccagagatattccaca

SEQ ID NO: 296668 - DNA, 20 bp, synthetic construct
  source 1..20: mol_type = other DNA
accctccagagatattccac

SEQ ID NO: 296669 - DNA, 20 bp, synthetic construct
  source 1..20: mol_type = other DNA
taccctccagagatattcca

SEQ ID NO: 296670 - DNA, 20 bp, synthetic construct
  source 1..20: mol_type = other DNA
gtaccctccagagatattcc

SEQ ID NO: 296671 - DNA, 20 bp, synthetic construct
  source 1..20: mol_type = other DNA
tgtaccctccagagatattc

SEQ ID NO: 296672 - DNA, 20 bp, synthetic construct
  source 1..20: mol_type = other DNA
gtgtaccctccagagatatt

SEQ ID NO: 296673 - DNA, 20 bp, synthetic construct
  source 1..20: mol_type = other DNA
tgtgtaccctccagagatat

SEQ ID NO: 296674 - DNA, 20 bp, synthetic construct
  source 1..20: mol_type = other DNA
ttgtgtaccctccagagata

SEQ ID NO: 296675 - DNA, 20 bp, synthetic construct
  source 1..20: mol_type = other DNA
cttgtgtaccctccagagat

SEQ ID NO: 296676 - DNA, 20 bp, synthetic construct
  source 1..20: mol_type = other DNA
tcttgtgtaccctccagaga

SEQ ID NO: 296677 - DNA, 20 bp, synthetic construct
  source 1..20: mol_type = other DNA
ttcttgtgtaccctccagag

SEQ ID NO: 296678 - DNA, 20 bp, synthetic construct
  source 1..20: mol_type = other DNA
tttcttgtgtaccctccaga

SEQ ID NO: 296679 - DNA, 20 bp, synthetic construct
  source 1..20: mol_type = other DNA
gtttcttgtgtaccctccag

SEQ ID NO: 296680 - DNA, 20 bp, synthetic construct
  source 1..20: mol_type = other DNA
agtttcttgtgtaccctcca

SEQ ID NO: 296681 - DNA, 20 bp, synthetic construct
  source 1..20: mol_type = other DNA
aagtttcttgtgtaccctcc

SEQ ID NO: 296682 - DNA, 20 bp, synthetic construct
  source 1..20: mol_type = other DNA
taagtttcttgtgtaccctc

SEQ ID NO: 296683 - DNA, 20 bp, synthetic construct
  source 1..20: mol_type = other DNA
ttaagtttcttgtgtaccct

SEQ ID NO: 296684 - DNA, 20 bp, synthetic construct
  source 1..20: mol_type = other DNA
tttaagtttcttgtgtaccc

SEQ ID NO: 296685 - DNA, 20 bp, synthetic construct
  source 1..20: mol_type = other DNA
ttttaagtttcttgtgtacc

SEQ ID NO: 296686 - DNA, 20 bp, synthetic construct
  source 1..20: mol_type = other DNA
attttaagtttcttgtgtac

SEQ ID NO: 296687 - DNA, 20 bp, synthetic construct
  source 1..20: mol_type = other DNA
cattttaagtttcttgtgta

SEQ ID NO: 296688 - DNA, 20 bp, synthetic construct
  source 1..20: mol_type = other DNA
tcattttaagtttcttgtgt

SEQ ID NO: 296689 - DNA, 20 bp, synthetic construct
  source 1..20: mol_type = other DNA
atcattttaagtttcttgtg

SEQ ID NO: 296690 - DNA, 20 bp, synthetic construct
  source 1..20: mol_type = other DNA
gatcattttaagtttcttgt

SEQ ID NO: 296691 - DNA, 20 bp, synthetic construct
  source 1..20: mol_type = other DNA
tgatcattttaagtttcttg

SEQ ID NO: 296692 - DNA, 20 bp, synthetic construct
  source 1..20: mol_type = other DNA
gtgatcattttaagtttctt

SEQ ID NO: 296693 - DNA, 20 bp, synthetic construct
  source 1..20: mol_type = other DNA
agtgatcattttaagtttct

SEQ ID NO: 296694 - DNA, 20 bp, synthetic construct
  source 1..20: mol_type = other DNA
cagtgatcattttaagtttc

SEQ ID NO: 296695 - DNA, 20 bp, synthetic construct
  source 1..20: mol_type = other DNA
acagtgatcattttaagttt

SEQ ID NO: 296696 - DNA, 20 bp, synthetic construct
  source 1..20: mol_type = other DNA
gacagtgatcattttaagtt

SEQ ID NO: 296697 - DNA, 20 bp, synthetic construct
  source 1..20: mol_type = other DNA
agacagtgatcattttaagt

SEQ ID NO: 296698 - DNA, 20 bp, synthetic construct
  source 1..20: mol_type = other DNA
gagacagtgatcattttaag

SEQ ID NO: 296699 - DNA, 20 bp, synthetic construct
  source 1..20: mol_type = other DNA
agagacagtgatcattttaa

SEQ ID NO: 296700 - DNA, 20 bp, synthetic construct
  source 1..20: mol_type = other DNA
cagagacagtgatcatttta

SEQ ID NO: 296701 - DNA, 20 bp, synthetic construct
  source 1..20: mol_type = other DNA
ccagagacagtgatcatttt

SEQ ID NO: 296702 - DNA, 20 bp, synthetic construct
  source 1..20: mol_type = other DNA
cccagagacagtgatcattt

SEQ ID NO: 296703 - DNA, 20 bp, synthetic construct
  source 1..20: mol_type = other DNA
ccccagagacagtgatcatt

SEQ ID NO: 296704 - DNA, 20 bp, synthetic construct
  source 1..20: mol_type = other DNA
tccccagagacagtgatcat

SEQ ID NO: 296705 - DNA, 20 bp, synthetic construct
  source 1..20: mol_type = other DNA
ctccccagagacagtgatca

SEQ ID NO: 296706 - DNA, 20 bp, synthetic construct
  source 1..20: mol_type = other DNA
cctccccagagacagtgatc

SEQ ID NO: 296707 - DNA, 20 bp, synthetic construct
  source 1..20: mol_type = other DNA
ccctccccagagacagtgat

SEQ ID NO: 296708 - DNA, 20 bp, synthetic construct
  source 1..20: mol_type = other DNA
accctccccagagacagtga

SEQ ID NO: 296709 - DNA, 20 bp, synthetic construct
  source 1..20: mol_type = other DNA
taccctccccagagacagtg

SEQ ID NO: 296710 - DNA, 20 bp, synthetic construct
  source 1..20: mol_type = other DNA
gtaccctccccagagacagt

SEQ ID NO: 296711 - DNA, 20 bp, synthetic construct
  source 1..20: mol_type = other DNA
ggtaccctccccagagacag

SEQ ID NO: 296712 - DNA, 20 bp, synthetic construct
  source 1..20: mol_type = other DNA
aggtaccctccccagagaca

SEQ ID NO: 296713 - DNA, 20 bp, synthetic construct
  source 1..20: mol_type = other DNA
caggtaccctccccagagac

SEQ ID NO: 296714 - DNA, 20 bp, synthetic construct
  source 1..20: mol_type = other DNA
ccaggtaccctccccagaga

SEQ ID NO: 296715 - DNA, 20 bp, synthetic construct
  source 1..20: mol_type = other DNA
cccaggtaccctccccagag

SEQ ID NO: 296716 - DNA, 20 bp, synthetic construct
  source 1..20: mol_type = other DNA
acccaggtaccctccccaga

SEQ ID NO: 296717 - DNA, 20 bp, synthetic construct
  source 1..20: mol_type = other DNA
cacccaggtaccctccccag

SEQ ID NO: 296718 - DNA, 20 bp, synthetic construct
  source 1..20: mol_type = other DNA
gcacccaggtaccctcccca

SEQ ID NO: 296719 - DNA, 20 bp, synthetic construct
  source 1..20: mol_type = other DNA
ggcacccaggtaccctcccc

SEQ ID NO: 296720 - DNA, 20 bp, synthetic construct
  source 1..20: mol_type = other DNA
aggcacccaggtaccctccc

SEQ ID NO: 296721 - DNA, 20 bp, synthetic construct
  source 1..20: mol_type = other DNA
caggcacccaggtaccctcc

SEQ ID NO: 296722 - DNA, 20 bp, synthetic construct
  source 1..20: mol_type = other DNA
ccaggcacccaggtaccctc

SEQ ID NO: 296723 - DNA, 20 bp, synthetic construct
  source 1..20: mol_type = other DNA
cccaggcacccaggtaccct

SEQ ID NO: 296724 - DNA, 20 bp, synthetic construct
  source 1..20: mol_type = other DNA
tcccaggcacccaggtaccc

SEQ ID NO: 296725 - DNA, 20 bp, synthetic construct
  source 1..20: mol_type = other DNA
ctcccaggcacccaggtacc

SEQ ID NO: 296726 - DNA, 20 bp, synthetic construct
  source 1..20: mol_type = other DNA
cctcccaggcacccaggtac

SEQ ID NO: 296727 - DNA, 20 bp, synthetic construct
  source 1..20: mol_type = other DNA
gcctcccaggcacccaggta

SEQ ID NO: 296728 - DNA, 20 bp, synthetic construct
  source 1..20: mol_type = other DNA
tgcctcccaggcacccaggt

SEQ ID NO: 296729 - DNA, 20 bp, synthetic construct
  source 1..20: mol_type = other DNA
ctgcctcccaggcacccagg

SEQ ID NO: 296730 - DNA, 20 bp, synthetic construct
  source 1..20: mol_type = other DNA
cctgcctcccaggcacccag

SEQ ID NO: 296731 - DNA, 20 bp, synthetic construct
  source 1..20: mol_type = other DNA
acctgcctcccaggcaccca

SEQ ID NO: 296732 - DNA, 20 bp, synthetic construct
  source 1..20: mol_type = other DNA
gacctgcctcccaggcaccc

SEQ ID NO: 296733 - DNA, 20 bp, synthetic construct
  source 1..20: mol_type = other DNA
tgacctgcctcccaggcacc

SEQ ID NO: 296734 - DNA, 20 bp, synthetic construct
  source 1..20: mol_type = other DNA
ctgacctgcctcccaggcac

SEQ ID NO: 296735 - DNA, 20 bp, synthetic construct
  source 1..20: mol_type = other DNA
cctgacctgcctcccaggca

SEQ ID NO: 296736 - DNA, 20 bp, synthetic construct
  source 1..20: mol_type = other DNA
ccctgacctgcctcccaggc

SEQ ID NO: 296737 - DNA, 20 bp, synthetic construct
  source 1..20: mol_type = other DNA
tccctgacctgcctcccagg

SEQ ID NO: 296738 - DNA, 20 bp, synthetic construct
  source 1..20: mol_type = other DNA
ttccctgacctgcctcccag

SEQ ID NO: 296739 - DNA, 20 bp, synthetic construct
  source 1..20: mol_type = other DNA
cttccctgacctgcctccca

SEQ ID NO: 296740 - DNA, 20 bp, synthetic construct
  source 1..20: mol_type = other DNA
ccttccctgacctgcctccc

SEQ ID NO: 296741 - DNA, 20 bp, synthetic construct
  source 1..20: mol_type = other DNA
tccttccctgacctgcctcc

SEQ ID NO: 296742 - DNA, 20 bp, synthetic construct
  source 1..20: mol_type = other DNA
ctccttccctgacctgcctc

SEQ ID NO: 296743 - DNA, 20 bp, synthetic construct
  source 1..20: mol_type = other DNA
actccttccctgacctgcct

SEQ ID NO: 296744 - DNA, 20 bp, synthetic construct
  source 1..20: mol_type = other DNA
cactccttccctgacctgcc

SEQ ID NO: 296745 - DNA, 20 bp, synthetic construct
  source 1..20: mol_type = other DNA
ccactccttccctgacctgc

SEQ ID NO: 296746 - DNA, 20 bp, synthetic construct
  source 1..20: mol_type = other DNA
cccactccttccctgacctg

SEQ ID NO: 296747 - DNA, 20 bp, synthetic construct
  source 1..20: mol_type = other DNA
gcccactccttccctgacct

SEQ ID NO: 296748 - DNA, 20 bp, synthetic construct
  source 1..20: mol_type = other DNA
tgcccactccttccctgacc

SEQ ID NO: 296749 - DNA, 20 bp, synthetic construct
  source 1..20: mol_type = other DNA
gtgcccactccttccctgac

SEQ ID NO: 296750 - DNA, 20 bp, synthetic construct
  source 1..20: mol_type = other DNA
tgtgcccactccttccctga

SEQ ID NO: 296751 - DNA, 20 bp, synthetic construct
  source 1..20: mol_type = other DNA
ctgtgcccactccttccctg

SEQ ID NO: 296752 - DNA, 20 bp, synthetic construct
  source 1..20: mol_type = other DNA
cctgtgcccactccttccct

SEQ ID NO: 296753 - DNA, 20 bp, synthetic construct
  source 1..20: mol_type = other DNA
acctgtgcccactccttccc

SEQ ID NO: 296754 - DNA, 20 bp, synthetic construct
  source 1..20: mol_type = other DNA
tacctgtgcccactccttcc

SEQ ID NO: 296755 - DNA, 20 bp, synthetic construct
  source 1..20: mol_type = other DNA
atacctgtgcccactccttc

SEQ ID NO: 296756 - DNA, 20 bp, synthetic construct
  source 1..20: mol_type = other DNA
aatacctgtgcccactcctt

SEQ ID NO: 296757 - DNA, 20 bp, synthetic construct
  source 1..20: mol_type = other DNA
taatacctgtgcccactcct

SEQ ID NO: 296758 - DNA, 20 bp, synthetic construct
  source 1..20: mol_type = other DNA
gtaatacctgtgcccactcc

SEQ ID NO: 296759 - DNA, 20 bp, synthetic construct
  source 1..20: mol_type = other DNA
ggtaatacctgtgcccactc

SEQ ID NO: 296760 - DNA, 20 bp, synthetic construct
  source 1..20: mol_type = other DNA
tggtaatacctgtgcccact

SEQ ID NO: 296761 - DNA, 20 bp, synthetic construct
  source 1..20: mol_type = other DNA
ttggtaatacctgtgcccac

SEQ ID NO: 296762 - DNA, 20 bp, synthetic construct
  source 1..20: mol_type = other DNA
attggtaatacctgtgccca

SEQ ID NO: 296763 - DNA, 20 bp, synthetic construct
  source 1..20: mol_type = other DNA
aattggtaatacctgtgccc

SEQ ID NO: 296764 - DNA, 20 bp, synthetic construct
  source 1..20: mol_type = other DNA
caattggtaatacctgtgcc

SEQ ID NO: 296765 - DNA, 20 bp, synthetic construct
  source 1..20: mol_type = other DNA
ccaattggtaatacctgtgc

SEQ ID NO: 296766 - DNA, 20 bp, synthetic construct
  source 1..20: mol_type = other DNA
tccaattggtaatacctgtg

SEQ ID NO: 296767 - DNA, 20 bp, synthetic construct
  source 1..20: mol_type = other DNA
ttccaattggtaatacctgt

SEQ ID NO: 296768 - DNA, 20 bp, synthetic construct
  source 1..20: mol_type = other DNA
cttccaattggtaatacctg

SEQ ID NO: 296769 - DNA, 20 bp, synthetic construct
  source 1..20: mol_type = other DNA
tcttccaattggtaatacct

SEQ ID NO: 296770 - DNA, 20 bp, synthetic construct
  source 1..20: mol_type = other DNA
gtcttccaattggtaatacc

SEQ ID NO: 296771 - DNA, 20 bp, synthetic construct
  source 1..20: mol_type = other DNA
tgtcttccaattggtaatac

SEQ ID NO: 296772 - DNA, 20 bp, synthetic construct
  source 1..20: mol_type = other DNA
ttgtcttccaattggtaata

SEQ ID NO: 296773 - DNA, 20 bp, synthetic construct
  source 1..20: mol_type = other DNA
attgtcttccaattggtaat

SEQ ID NO: 296774 - DNA, 20 bp, synthetic construct
  source 1..20: mol_type = other DNA
tattgtcttccaattggtaa

SEQ ID NO: 296775 - DNA, 20 bp, synthetic construct
  source 1..20: mol_type = other DNA
ttattgtcttccaattggta

SEQ ID NO: 296776 - DNA, 20 bp, synthetic construct
  source 1..20: mol_type = other DNA
tttattgtcttccaattggt

SEQ ID NO: 296777 - DNA, 20 bp, synthetic construct
  source 1..20: mol_type = other DNA
ttttattgtcttccaattgg

SEQ ID NO: 296778 - DNA, 20 bp, synthetic construct
  source 1..20: mol_type = other DNA
tttttattgtcttccaattg

SEQ ID NO: 296779 - DNA, 20 bp, synthetic construct
  source 1..20: mol_type = other DNA
gtttttattgtcttccaatt

SEQ ID NO: 296780 - DNA, 20 bp, synthetic construct
  source 1..20: mol_type = other DNA
tgtttttattgtcttccaat

SEQ ID NO: 296781 - DNA, 20 bp, synthetic construct
  source 1..20: mol_type = other DNA
ttgtttttattgtcttccaa

SEQ ID NO: 296782 - DNA, 20 bp, synthetic construct
  source 1..20: mol_type = other DNA
gttgtttttattgtcttcca

SEQ ID NO: 296783 - DNA, 20 bp, synthetic construct
  source 1..20: mol_type = other DNA
tgttgtttttattgtcttcc

SEQ ID NO: 296784 - DNA, 20 bp, synthetic construct
  source 1..20: mol_type = other DNA
ctgttgtttttattgtcttc

SEQ ID NO: 296785 - DNA, 20 bp, synthetic construct
  source 1..20: mol_type = other DNA
gctgttgtttttattgtctt

SEQ ID NO: 296786 - DNA, 20 bp, synthetic construct
  source 1..20: mol_type = other DNA
agctgttgtttttattgtct

SEQ ID NO: 296787 - DNA, 20 bp, synthetic construct
  source 1..20: mol_type = other DNA
gagctgttgtttttattgtc

SEQ ID NO: 296788 - DNA, 20 bp, synthetic construct
  source 1..20: mol_type = other DNA
ggagctgttgtttttattgt

SEQ ID NO: 296789 - DNA, 20 bp, synthetic construct
  source 1..20: mol_type = other DNA
aggagctgttgtttttattg

SEQ ID NO: 296790 - DNA, 20 bp, synthetic construct
  source 1..20: mol_type = other DNA
caggagctgttgtttttatt

SEQ ID NO: 296791 - DNA, 20 bp, synthetic construct
  source 1..20: mol_type = other DNA
ccaggagctgttgtttttat

SEQ ID NO: 296792 - DNA, 20 bp, synthetic construct
  source 1..20: mol_type = other DNA
gccaggagctgttgttttta

SEQ ID NO: 296793 - DNA, 20 bp, synthetic construct
  source 1..20: mol_type = other DNA
ggccaggagctgttgttttt

SEQ ID NO: 296794 - DNA, 20 bp, synthetic construct
  source 1..20: mol_type = other DNA
tggccaggagctgttgtttt

SEQ ID NO: 296795 - DNA, 20 bp, synthetic construct
  source 1..20: mol_type = other DNA
ctggccaggagctgttgttt

SEQ ID NO: 296796 - DNA, 20 bp, synthetic construct
  source 1..20: mol_type = other DNA
cctggccaggagctgttgtt

SEQ ID NO: 296797 - DNA, 20 bp, synthetic construct
  source 1..20: mol_type = other DNA
gcctggccaggagctgttgt

SEQ ID NO: 296798 - DNA, 20 bp, synthetic construct
  source 1..20: mol_type = other DNA
cgcctggccaggagctgttg

SEQ ID NO: 296799 - DNA, 20 bp, synthetic construct
  source 1..20: mol_type = other DNA
gcgcctggccaggagctgtt

SEQ ID NO: 296800 - DNA, 20 bp, synthetic construct
  source 1..20: mol_type = other DNA
tgcgcctggccaggagctgt

SEQ ID NO: 296801 - DNA, 20 bp, synthetic construct
  source 1..20: mol_type = other DNA
ctgcgcctggccaggagctg

SEQ ID NO: 296802 - DNA, 20 bp, synthetic construct
  source 1..20: mol_type = other DNA
actgcgcctggccaggagct

SEQ ID NO: 296803 - DNA, 20 bp, synthetic construct
  source 1..20: mol_type = other DNA
cactgcgcctggccaggagc

SEQ ID NO: 296804 - DNA, 20 bp, synthetic construct
  source 1..20: mol_type = other DNA
ccactgcgcctggccaggag

SEQ ID NO: 296805 - DNA, 20 bp, synthetic construct
  source 1..20: mol_type = other DNA
gccactgcgcctggccagga

SEQ ID NO: 296806 - DNA, 20 bp, synthetic construct
  source 1..20: mol_type = other DNA
agccactgcgcctggccagg

SEQ ID NO: 296807 - DNA, 20 bp, synthetic construct
  source 1..20: mol_type = other DNA
gagccactgcgcctggccag

SEQ ID NO: 296808 - DNA, 20 bp, synthetic construct
  source 1..20: mol_type = other DNA
tgagccactgcgcctggcca

SEQ ID NO: 296809 - DNA, 20 bp, synthetic construct
  source 1..20: mol_type = other DNA
gtgagccactgcgcctggcc

SEQ ID NO: 296810 - DNA, 20 bp, synthetic construct
  source 1..20: mol_type = other DNA
cgtgagccactgcgcctggc

SEQ ID NO: 296811 - DNA, 20 bp, synthetic construct
  source 1..20: mol_type = other DNA
gcgtgagccactgcgcctgg

SEQ ID NO: 296812 - DNA, 20 bp, synthetic construct
  source 1..20: mol_type = other DNA
ggcgtgagccactgcgcctg

SEQ ID NO: 296813 - DNA, 20 bp, synthetic construct
  source 1..20: mol_type = other DNA
aggcgtgagccactgcgcct

SEQ ID NO: 296814 - DNA, 20 bp, synthetic construct
  source 1..20: mol_type = other DNA
caggcgtgagccactgcgcc

SEQ ID NO: 296815 - DNA, 20 bp, synthetic construct
  source 1..20: mol_type = other DNA
acaggcgtgagccactgcgc

SEQ ID NO: 296816 - DNA, 20 bp, synthetic construct
  source 1..20: mol_type = other DNA
tacaggcgtgagccactgcg

SEQ ID NO: 296817 - DNA, 20 bp, synthetic construct
  source 1..20: mol_type = other DNA
ttacaggcgtgagccactgc

SEQ ID NO: 296818 - DNA, 20 bp, synthetic construct
  source 1..20: mol_type = other DNA
attacaggcgtgagccactg

SEQ ID NO: 296819 - DNA, 20 bp, synthetic construct
  source 1..20: mol_type = other DNA
cattacaggcgtgagccact

SEQ ID NO: 296820 - DNA, 20 bp, synthetic construct
  source 1..20: mol_type = other DNA
ccattacaggcgtgagccac

SEQ ID NO: 296821 - DNA, 20 bp, synthetic construct
  source 1..20: mol_type = other DNA
gccattacaggcgtgagcca

SEQ ID NO: 296822 - DNA, 20 bp, synthetic construct
  source 1..20: mol_type = other DNA
tgccattacaggcgtgagcc

SEQ ID NO: 296823 - DNA, 20 bp, synthetic construct
  source 1..20: mol_type = other DNA
ctgccattacaggcgtgagc

SEQ ID NO: 296824 - DNA, 20 bp, synthetic construct
  source 1..20: mol_type = other DNA
gctgccattacaggcgtgag

SEQ ID NO: 296825 - DNA, 20 bp, synthetic construct
  source 1..20: mol_type = other DNA
tgctgccattacaggcgtga

SEQ ID NO: 296826 - DNA, 20 bp, synthetic construct
  source 1..20: mol_type = other DNA
gtgctgccattacaggcgtg

SEQ ID NO: 296827 - DNA, 20 bp, synthetic construct
  source 1..20: mol_type = other DNA
agtgctgccattacaggcgt

SEQ ID NO: 296828 - DNA, 20 bp, synthetic construct
  source 1..20: mol_type = other DNA
gagtgctgccattacaggcg

SEQ ID NO: 296829 - DNA, 20 bp, synthetic construct
  source 1..20: mol_type = other DNA
agagtgctgccattacaggc

SEQ ID NO: 296830 - DNA, 20 bp, synthetic construct
  source 1..20: mol_type = other DNA
cagagtgctgccattacagg

SEQ ID NO: 296831 - DNA, 20 bp, synthetic construct
  source 1..20: mol_type = other DNA
tcagagtgctgccattacag

SEQ ID NO: 296832 - DNA, 20 bp, synthetic construct
  source 1..20: mol_type = other DNA
ctcagagtgctgccattaca

SEQ ID NO: 296833 - DNA, 20 bp, synthetic construct
  source 1..20: mol_type = other DNA
tctcagagtgctgccattac

SEQ ID NO: 296834 - DNA, 20 bp, synthetic construct
  source 1..20: mol_type = other DNA
ctctcagagtgctgccatta

SEQ ID NO: 296835 - DNA, 20 bp, synthetic construct
  source 1..20: mol_type = other DNA
cctctcagagtgctgccatt

SEQ ID NO: 296836 - DNA, 20 bp, synthetic construct
  source 1..20: mol_type = other DNA
gcctctcagagtgctgccat

SEQ ID NO: 296837 - DNA, 20 bp, synthetic construct
  source 1..20: mol_type = other DNA
agcctctcagagtgctgcca

SEQ ID NO: 296838 - DNA, 20 bp, synthetic construct
  source 1..20: mol_type = other DNA
cagcctctcagagtgctgcc

SEQ ID NO: 296839 - DNA, 20 bp, synthetic construct
  source 1..20: mol_type = other DNA
tcagcctctcagagtgctgc

SEQ ID NO: 296840 - DNA, 20 bp, synthetic construct
  source 1..20: mol_type = other DNA
ctcagcctctcagagtgctg

SEQ ID NO: 296841 - DNA, 20 bp, synthetic construct
  source 1..20: mol_type = other DNA
cctcagcctctcagagtgct

SEQ ID NO: 296842 - DNA, 20 bp, synthetic construct
  source 1..20: mol_type = other DNA
gcctcagcctctcagagtgc

SEQ ID NO: 296843 - DNA, 20 bp, synthetic construct
  source 1..20: mol_type = other DNA
cgcctcagcctctcagagtg

SEQ ID NO: 296844 - DNA, 20 bp, synthetic construct
  source 1..20: mol_type = other DNA
ccgcctcagcctctcagagt

SEQ ID NO: 296845 - DNA, 20 bp, synthetic construct
  source 1..20: mol_type = other DNA
cccgcctcagcctctcagag

SEQ ID NO: 296846 - DNA, 20 bp, synthetic construct
  source 1..20: mol_type = other DNA
gcccgcctcagcctctcaga

SEQ ID NO: 296847 - DNA, 20 bp, synthetic construct
  source 1..20: mol_type = other DNA
tgcccgcctcagcctctcag

SEQ ID NO: 296848 - DNA, 20 bp, synthetic construct
  source 1..20: mol_type = other DNA
ctgcccgcctcagcctctca

SEQ ID NO: 296849 - DNA, 20 bp, synthetic construct
  source 1..20: mol_type = other DNA
tctgcccgcctcagcctctc

SEQ ID NO: 296850 - DNA, 20 bp, synthetic construct
  source 1..20: mol_type = other DNA
atctgcccgcctcagcctct

SEQ ID NO: 296851 - DNA, 20 bp, synthetic construct
  source 1..20: mol_type = other DNA
aatctgcccgcctcagcctc

SEQ ID NO: 296852 - DNA, 20 bp, synthetic construct
  source 1..20: mol_type = other DNA
caatctgcccgcctcagcct

SEQ ID NO: 296853 - DNA, 20 bp, synthetic construct
  source 1..20: mol_type = other DNA
gcaatctgcccgcctcagcc

SEQ ID NO: 296854 - DNA, 20 bp, synthetic construct
  source 1..20: mol_type = other DNA
agcaatctgcccgcctcagc

SEQ ID NO: 296855 - DNA, 20 bp, synthetic construct
  source 1..20: mol_type = other DNA
aagcaatctgcccgcctcag

SEQ ID NO: 296856 - DNA, 20 bp, synthetic construct
  source 1..20: mol_type = other DNA
caagcaatctgcccgcctca

SEQ ID NO: 296857 - DNA, 20 bp, synthetic construct
  source 1..20: mol_type = other DNA
gcaagcaatctgcccgcctc

SEQ ID NO: 296858 - DNA, 20 bp, synthetic construct
  source 1..20: mol_type = other DNA
cgcaagcaatctgcccgcct

SEQ ID NO: 296859 - DNA, 20 bp, synthetic construct
  source 1..20: mol_type = other DNA
acgcaagcaatctgcccgcc

SEQ ID NO: 296860 - DNA, 20 bp, synthetic construct
  source 1..20: mol_type = other DNA
gacgcaagcaatctgcccgc

SEQ ID NO: 296861 - DNA, 20 bp, synthetic construct
  source 1..20: mol_type = other DNA
ggacgcaagcaatctgcccg

SEQ ID NO: 296862 - DNA, 20 bp, synthetic construct
  source 1..20: mol_type = other DNA
tggacgcaagcaatctgccc

SEQ ID NO: 296863 - DNA, 20 bp, synthetic construct
  source 1..20: mol_type = other DNA
ctggacgcaagcaatctgcc

SEQ ID NO: 296864 - DNA, 20 bp, synthetic construct
  source 1..20: mol_type = other DNA
cctggacgcaagcaatctgc

SEQ ID NO: 296865 - DNA, 20 bp, synthetic construct
  source 1..20: mol_type = other DNA
tcctggacgcaagcaatctg

SEQ ID NO: 296866 - DNA, 20 bp, synthetic construct
  source 1..20: mol_type = other DNA
ctcctggacgcaagcaatct

SEQ ID NO: 296867 - DNA, 20 bp, synthetic construct
  source 1..20: mol_type = other DNA
actcctggacgcaagcaatc

SEQ ID NO: 296868 - DNA, 20 bp, synthetic construct
  source 1..20: mol_type = other DNA
aactcctggacgcaagcaat

SEQ ID NO: 296869 - DNA, 20 bp, synthetic construct
  source 1..20: mol_type = other DNA
gaactcctggacgcaagcaa

SEQ ID NO: 296870 - DNA, 20 bp, synthetic construct
  source 1..20: mol_type = other DNA
tgaactcctggacgcaagca

SEQ ID NO: 296871 - DNA, 20 bp, synthetic construct
  source 1..20: mol_type = other DNA
ttgaactcctggacgcaagc

SEQ ID NO: 296872 - DNA, 20 bp, synthetic construct
  source 1..20: mol_type = other DNA
cttgaactcctggacgcaag

SEQ ID NO: 296873 - DNA, 20 bp, synthetic construct
  source 1..20: mol_type = other DNA
tcttgaactcctggacgcaa

SEQ ID NO: 296874 - DNA, 20 bp, synthetic construct
  source 1..20: mol_type = other DNA
gtcttgaactcctggacgca

SEQ ID NO: 296875 - DNA, 20 bp, synthetic construct
  source 1..20: mol_type = other DNA
ggtcttgaactcctggacgc

SEQ ID NO: 296876 - DNA, 20 bp, synthetic construct
  source 1..20: mol_type = other DNA
tggtcttgaactcctggacg

SEQ ID NO: 296877 - DNA, 20 bp, synthetic construct
  source 1..20: mol_type = other DNA
ctggtcttgaactcctggac

SEQ ID NO: 296878 - DNA, 20 bp, synthetic construct
  source 1..20: mol_type = other DNA
gctggtcttgaactcctgga

SEQ ID NO: 296879 - DNA, 20 bp, synthetic construct
  source 1..20: mol_type = other DNA
ggctggtcttgaactcctgg

SEQ ID NO: 296880 - DNA, 20 bp, synthetic construct
  source 1..20: mol_type = other DNA
aggctggtcttgaactcctg

SEQ ID NO: 296881 - DNA, 20 bp, synthetic construct
  source 1..20: mol_type = other DNA
caggctggtcttgaactcct

SEQ ID NO: 296882 - DNA, 20 bp, synthetic construct
  source 1..20: mol_type = other DNA
ccaggctggtcttgaactcc

SEQ ID NO: 296883 - DNA, 20 bp, synthetic construct
  source 1..20: mol_type = other DNA
cccaggctggtcttgaactc

SEQ ID NO: 296884 - DNA, 20 bp, synthetic construct
  source 1..20: mol_type = other DNA
gcccaggctggtcttgaact

SEQ ID NO: 296885 - DNA, 20 bp, synthetic construct
  source 1..20: mol_type = other DNA
tgcccaggctggtcttgaac

SEQ ID NO: 296886 - DNA, 20 bp, synthetic construct
  source 1..20: mol_type = other DNA
ttgcccaggctggtcttgaa

SEQ ID NO: 296887 - DNA, 20 bp, synthetic construct
  source 1..20: mol_type = other DNA
gttgcccaggctggtcttga

SEQ ID NO: 296888 - DNA, 20 bp, synthetic construct
  source 1..20: mol_type = other DNA
tgttgcccaggctggtcttg

SEQ ID NO: 296889 - DNA, 20 bp, synthetic construct
  source 1..20: mol_type = other DNA
atgttgcccaggctggtctt

SEQ ID NO: 296890 - DNA, 20 bp, synthetic construct
  source 1..20: mol_type = other DNA
tatgttgcccaggctggtct

SEQ ID NO: 296891 - DNA, 20 bp, synthetic construct
  source 1..20: mol_type = other DNA
ctatgttgcccaggctggtc

SEQ ID NO: 296892 - DNA, 20 bp, synthetic construct
  source 1..20: mol_type = other DNA
gctatgttgcccaggctggt

SEQ ID NO: 296893 - DNA, 20 bp, synthetic construct
  source 1..20: mol_type = other DNA
tgctatgttgcccaggctgg

SEQ ID NO: 296894 - DNA, 20 bp, synthetic construct
  source 1..20: mol_type = other DNA
ttgctatgttgcccaggctg

SEQ ID NO: 296895 - DNA, 20 bp, synthetic construct
  source 1..20: mol_type = other DNA
tttgctatgttgcccaggct

SEQ ID NO: 296896 - DNA, 20 bp, synthetic construct
  source 1..20: mol_type = other DNA
ttttgctatgttgcccaggc

SEQ ID NO: 296897 - DNA, 20 bp, synthetic construct
  source 1..20: mol_type = other DNA
gttttgctatgttgcccagg

SEQ ID NO: 296898 - DNA, 20 bp, synthetic construct
  source 1..20: mol_type = other DNA
ggttttgctatgttgcccag

SEQ ID NO: 296899 - DNA, 20 bp, synthetic construct
  source 1..20: mol_type = other DNA
gggttttgctatgttgccca

SEQ ID NO: 296900 - DNA, 20 bp, synthetic construct
  source 1..20: mol_type = other DNA
ggggttttgctatgttgccc

SEQ ID NO: 296901 - DNA, 20 bp, synthetic construct
  source 1..20: mol_type = other DNA
cggggttttgctatgttgcc

SEQ ID NO: 296902 - DNA, 20 bp, synthetic construct
  source 1..20: mol_type = other DNA
acggggttttgctatgttgc

SEQ ID NO: 296903 - DNA, 20 bp, synthetic construct
  source 1..20: mol_type = other DNA
aacggggttttgctatgttg

SEQ ID NO: 296904 - DNA, 20 bp, synthetic construct
  source 1..20: mol_type = other DNA
aaacggggttttgctatgtt

SEQ ID NO: 296905 - DNA, 20 bp, synthetic construct
  source 1..20: mol_type = other DNA
gaaacggggttttgctatgt

SEQ ID NO: 296906 - DNA, 20 bp, synthetic construct
  source 1..20: mol_type = other DNA
agaaacggggttttgctatg

SEQ ID NO: 296907 - DNA, 20 bp, synthetic construct
  source 1..20: mol_type = other DNA
tagaaacggggttttgctat

SEQ ID NO: 296908 - DNA, 20 bp, synthetic construct
  source 1..20: mol_type = other DNA
atagaaacggggttttgcta

SEQ ID NO: 296909 - DNA, 20 bp, synthetic construct
  source 1..20: mol_type = other DNA
aatagaaacggggttttgct

SEQ ID NO: 296910 - DNA, 20 bp, synthetic construct
  source 1..20: mol_type = other DNA
taatagaaacggggttttgc

SEQ ID NO: 296911 - DNA, 20 bp, synthetic construct
  source 1..20: mol_type = other DNA
ttaatagaaacggggttttg

SEQ ID NO: 296912 - DNA, 20 bp, synthetic construct
  source 1..20: mol_type = other DNA
tttaatagaaacggggtttt

SEQ ID NO: 296913 - DNA, 20 bp, synthetic construct
  source 1..20: mol_type = other DNA
ttttaatagaaacggggttt

SEQ ID NO: 296914 - DNA, 20 bp, synthetic construct
  source 1..20: mol_type = other DNA
tttttaatagaaacggggtt

SEQ ID NO: 296915 - DNA, 20 bp, synthetic construct
  source 1..20: mol_type = other DNA
atttttaatagaaacggggt

SEQ ID NO: 296916 - DNA, 20 bp, synthetic construct
  source 1..20: mol_type = other DNA
tatttttaatagaaacgggg

SEQ ID NO: 296917 - DNA, 20 bp, synthetic construct
  source 1..20: mol_type = other DNA
gtatttttaatagaaacggg

SEQ ID NO: 296918 - DNA, 20 bp, synthetic construct
  source 1..20: mol_type = other DNA
tgtatttttaatagaaacgg

SEQ ID NO: 296919 - DNA, 20 bp, synthetic construct
  source 1..20: mol_type = other DNA
ttgtatttttaatagaaacg

SEQ ID NO: 296920 - DNA, 20 bp, synthetic construct
  source 1..20: mol_type = other DNA
tttgtatttttaatagaaac

SEQ ID NO: 296921 - DNA, 20 bp, synthetic construct
  source 1..20: mol_type = other DNA
ttttgtatttttaatagaaa

SEQ ID NO: 296922 - DNA, 20 bp, synthetic construct
  source 1..20: mol_type = other DNA
tttttgtatttttaatagaa

SEQ ID NO: 296923 - DNA, 20 bp, synthetic construct
  source 1..20: mol_type = other DNA
ttttttgtatttttaataga

SEQ ID NO: 296924 - DNA, 20 bp, synthetic construct
  source 1..20: mol_type = other DNA
attttttgtatttttaatag

SEQ ID NO: 296925 - DNA, 20 bp, synthetic construct
  source 1..20: mol_type = other DNA
aattttttgtatttttaata

SEQ ID NO: 296926 - DNA, 20 bp, synthetic construct
  source 1..20: mol_type = other DNA
taattttttgtatttttaat

SEQ ID NO: 296927 - DNA, 20 bp, synthetic construct
  source 1..20: mol_type = other DNA
ctaattttttgtatttttaa

SEQ ID NO: 296928 - DNA, 20 bp, synthetic construct
  source 1..20: mol_type = other DNA
gctaattttttgtattttta

SEQ ID NO: 296929 - DNA, 20 bp, synthetic construct
  source 1..20: mol_type = other DNA
ggctaattttttgtattttt

SEQ ID NO: 296930 - DNA, 20 bp, synthetic construct
  source 1..20: mol_type = other DNA
tggctaattttttgtatttt

SEQ ID NO: 296931 - DNA, 20 bp, synthetic construct
  source 1..20: mol_type = other DNA
ctggctaattttttgtattt

SEQ ID NO: 296932 - DNA, 20 bp, synthetic construct
  source 1..20: mol_type = other DNA
cctggctaattttttgtatt

SEQ ID NO: 296933 - DNA, 20 bp, synthetic construct
  source 1..20: mol_type = other DNA
acctggctaattttttgtat

SEQ ID NO: 296934 - DNA, 20 bp, synthetic construct
  source 1..20: mol_type = other DNA
cacctggctaattttttgta

SEQ ID NO: 296935 - DNA, 20 bp, synthetic construct
  source 1..20: mol_type = other DNA
acacctggctaattttttgt

SEQ ID NO: 296936 - DNA, 20 bp, synthetic construct
  source 1..20: mol_type = other DNA
cacacctggctaattttttg

SEQ ID NO: 296937 - DNA, 20 bp, synthetic construct
  source 1..20: mol_type = other DNA
ccacacctggctaatttttt

SEQ ID NO: 296938 - DNA, 20 bp, synthetic construct
  source 1..20: mol_type = other DNA
accacacctggctaattttt

SEQ ID NO: 296939 - DNA, 20 bp, synthetic construct
  source 1..20: mol_type = other DNA
caccacacctggctaatttt

SEQ ID NO: 296940 - DNA, 20 bp, synthetic construct
  source 1..20: mol_type = other DNA
ccaccacacctggctaattt

SEQ ID NO: 296941 - DNA, 20 bp, synthetic construct
  source 1..20: mol_type = other DNA
gccaccacacctggctaatt

SEQ ID NO: 296942 - DNA, 20 bp, synthetic construct
  source 1..20: mol_type = other DNA
tgccaccacacctggctaat

SEQ ID NO: 296943 - DNA, 20 bp, synthetic construct
  source 1..20: mol_type = other DNA
atgccaccacacctggctaa

SEQ ID NO: 296944 - DNA, 20 bp, synthetic construct
  source 1..20: mol_type = other DNA
catgccaccacacctggcta

SEQ ID NO: 296945 - DNA, 20 bp, synthetic construct
  source 1..20: mol_type = other DNA
gcatgccaccacacctggct

SEQ ID NO: 296946 - DNA, 20 bp, synthetic construct
  source 1..20: mol_type = other DNA
tgcatgccaccacacctggc

SEQ ID NO: 296947 - DNA, 20 bp, synthetic construct
  source 1..20: mol_type = other DNA
gtgcatgccaccacacctgg

SEQ ID NO: 296948 - DNA, 20 bp, synthetic construct
  source 1..20: mol_type = other DNA
ggtgcatgccaccacacctg

SEQ ID NO: 296949 - DNA, 20 bp, synthetic construct
  source 1..20: mol_type = other DNA
aggtgcatgccaccacacct

SEQ ID NO: 296950 - DNA, 20 bp, synthetic construct
  source 1..20: mol_type = other DNA
caggtgcatgccaccacacc

SEQ ID NO: 296951 - DNA, 20 bp, synthetic construct
  source 1..20: mol_type = other DNA
acaggtgcatgccaccacac

SEQ ID NO: 296952 - DNA, 20 bp, synthetic construct
  source 1..20: mol_type = other DNA
tacaggtgcatgccaccaca

SEQ ID NO: 296953 - DNA, 20 bp, synthetic construct
  source 1..20: mol_type = other DNA
ttacaggtgcatgccaccac

SEQ ID NO: 296954 - DNA, 20 bp, synthetic construct
  source 1..20: mol_type = other DNA
attacaggtgcatgccacca

SEQ ID NO: 296955 - DNA, 20 bp, synthetic construct
  source 1..20: mol_type = other DNA
gattacaggtgcatgccacc

SEQ ID NO: 296956 - DNA, 20 bp, synthetic construct
  source 1..20: mol_type = other DNA
ggattacaggtgcatgccac

SEQ ID NO: 296957 - DNA, 20 bp, synthetic construct
  source 1..20: mol_type = other DNA
gggattacaggtgcatgcca

SEQ ID NO: 296958 - DNA, 20 bp, synthetic construct
  source 1..20: mol_type = other DNA
tgggattacaggtgcatgcc

SEQ ID NO: 296959 - DNA, 20 bp, synthetic construct
  source 1..20: mol_type = other DNA
ctgggattacaggtgcatgc

SEQ ID NO: 296960 - DNA, 20 bp, synthetic construct
  source 1..20: mol_type = other DNA
gctgggattacaggtgcatg

SEQ ID NO: 296961 - DNA, 20 bp, synthetic construct
  source 1..20: mol_type = other DNA
agctgggattacaggtgcat

SEQ ID NO: 296962 - DNA, 20 bp, synthetic construct
  source 1..20: mol_type = other DNA
tagctgggattacaggtgca

SEQ ID NO: 296963 - DNA, 20 bp, synthetic construct
  source 1..20: mol_type = other DNA
gtagctgggattacaggtgc

SEQ ID NO: 296964 - DNA, 20 bp, synthetic construct
  source 1..20: mol_type = other DNA
agtagctgggattacaggtg

SEQ ID NO: 296965 - DNA, 20 bp, synthetic construct
  source 1..20: mol_type = other DNA
gagtagctgggattacaggt

SEQ ID NO: 296966 - DNA, 20 bp, synthetic construct
  source 1..20: mol_type = other DNA
cgagtagctgggattacagg

SEQ ID NO: 296967 - DNA, 20 bp, synthetic construct
  source 1..20: mol_type = other DNA
ccgagtagctgggattacag

SEQ ID NO: 296968 - DNA, 20 bp, synthetic construct
  source 1..20: mol_type = other DNA
cccgagtagctgggattaca

SEQ ID NO: 296969 - DNA, 20 bp, synthetic construct
  source 1..20: mol_type = other DNA
tcccgagtagctgggattac

SEQ ID NO: 296970 - DNA, 20 bp, synthetic construct
  source 1..20: mol_type = other DNA
ctcccgagtagctgggatta

SEQ ID NO: 296971 - DNA, 20 bp, synthetic construct
  source 1..20: mol_type = other DNA
cctcccgagtagctgggatt

SEQ ID NO: 296972 - DNA, 20 bp, synthetic construct
  source 1..20: mol_type = other DNA
gcctcccgagtagctgggat

SEQ ID NO: 296973 - DNA, 20 bp, synthetic construct
  source 1..20: mol_type = other DNA
agcctcccgagtagctggga

SEQ ID NO: 296974 - DNA, 20 bp, synthetic construct
  source 1..20: mol_type = other DNA
cagcctcccgagtagctggg

SEQ ID NO: 296975 - DNA, 20 bp, synthetic construct
  source 1..20: mol_type = other DNA
tcagcctcccgagtagctgg

SEQ ID NO: 296976 - DNA, 20 bp, synthetic construct
  source 1..20: mol_type = other DNA
ctcagcctcccgagtagctg

SEQ ID NO: 296977 - DNA, 20 bp, synthetic construct
  source 1..20: mol_type = other DNA
cctcagcctcccgagtagct

SEQ ID NO: 296978 - DNA, 20 bp, synthetic construct
  source 1..20: mol_type = other DNA
acctcagcctcccgagtagc

SEQ ID NO: 296979 - DNA, 20 bp, synthetic construct
  source 1..20: mol_type = other DNA
cacctcagcctcccgagtag

SEQ ID NO: 296980 - DNA, 20 bp, synthetic construct
  source 1..20: mol_type = other DNA
ccacctcagcctcccgagta

SEQ ID NO: 296981 - DNA, 20 bp, synthetic construct
  source 1..20: mol_type = other DNA
cccacctcagcctcccgagt

SEQ ID NO: 296982 - DNA, 20 bp, synthetic construct
  source 1..20: mol_type = other DNA
tcccacctcagcctcccgag

SEQ ID NO: 296983 - DNA, 20 bp, synthetic construct
  source 1..20: mol_type = other DNA
ctcccacctcagcctcccga

SEQ ID NO: 296984 - DNA, 20 bp, synthetic construct
  source 1..20: mol_type = other DNA
tctcccacctcagcctcccg

SEQ ID NO: 296985 - DNA, 20 bp, synthetic construct
  source 1..20: mol_type = other DNA
ttctcccacctcagcctccc

SEQ ID NO: 296986 - DNA, 20 bp, synthetic construct
  source 1..20: mol_type = other DNA
attctcccacctcagcctcc

SEQ ID NO: 296987 - DNA, 20 bp, synthetic construct
  source 1..20: mol_type = other DNA
gattctcccacctcagcctc

SEQ ID NO: 296988 - DNA, 20 bp, synthetic construct
  source 1..20: mol_type = other DNA
tgattctcccacctcagcct

SEQ ID NO: 296989 - DNA, 20 bp, synthetic construct
  source 1..20: mol_type = other DNA
gtgattctcccacctcagcc

SEQ ID NO: 296990 - DNA, 20 bp, synthetic construct
  source 1..20: mol_type = other DNA
ggtgattctcccacctcagc

SEQ ID NO: 296991 - DNA, 20 bp, synthetic construct
  source 1..20: mol_type = other DNA
aggtgattctcccacctcag

SEQ ID NO: 296992 - DNA, 20 bp, synthetic construct
  source 1..20: mol_type = other DNA
caggtgattctcccacctca

SEQ ID NO: 296993 - DNA, 20 bp, synthetic construct
  source 1..20: mol_type = other DNA
tcaggtgattctcccacctc

SEQ ID NO: 296994 - DNA, 20 bp, synthetic construct
  source 1..20: mol_type = other DNA
ctcaggtgattctcccacct

SEQ ID NO: 296995 - DNA, 20 bp, synthetic construct
  source 1..20: mol_type = other DNA
gctcaggtgattctcccacc

SEQ ID NO: 296996 - DNA, 20 bp, synthetic construct
  source 1..20: mol_type = other DNA
ggctcaggtgattctcccac

SEQ ID NO: 296997 - DNA, 20 bp, synthetic construct
  source 1..20: mol_type = other DNA
aggctcaggtgattctccca

SEQ ID NO: 296998 - DNA, 20 bp, synthetic construct
  source 1..20: mol_type = other DNA
caggctcaggtgattctccc

SEQ ID NO: 296999 - DNA, 20 bp, synthetic construct
  source 1..20: mol_type = other DNA
ccaggctcaggtgattctcc

SEQ ID NO: 297000 - DNA, 20 bp, synthetic construct
  source 1..20: mol_type = other DNA
cccaggctcaggtgattctc

SEQ ID NO: 297001 - DNA, 20 bp, synthetic construct
  source 1..20: mol_type = other DNA
tcccaggctcaggtgattct

SEQ ID NO: 297002 - DNA, 20 bp, synthetic construct
  source 1..20: mol_type = other DNA
ctcccaggctcaggtgattc

SEQ ID NO: 297003 - DNA, 20 bp, synthetic construct
  source 1..20: mol_type = other DNA
cctcccaggctcaggtgatt

SEQ ID NO: 297004 - DNA, 20 bp, synthetic construct
  source 1..20: mol_type = other DNA
acctcccaggctcaggtgat

SEQ ID NO: 297005 - DNA, 20 bp, synthetic construct
  source 1..20: mol_type = other DNA
gacctcccaggctcaggtga

SEQ ID NO: 297006 - DNA, 20 bp, synthetic construct
  source 1..20: mol_type = other DNA
tgacctcccaggctcaggtg

SEQ ID NO: 297007 - DNA, 20 bp, synthetic construct
  source 1..20: mol_type = other DNA
ttgacctcccaggctcaggt

SEQ ID NO: 297008 - DNA, 20 bp, synthetic construct
  source 1..20: mol_type = other DNA
cttgacctcccaggctcagg

SEQ ID NO: 297009 - DNA, 20 bp, synthetic construct
  source 1..20: mol_type = other DNA
ccttgacctcccaggctcag

SEQ ID NO: 297010 - DNA, 20 bp, synthetic construct
  source 1..20: mol_type = other DNA
gccttgacctcccaggctca

SEQ ID NO: 297011 - DNA, 20 bp, synthetic construct
  source 1..20: mol_type = other DNA
agccttgacctcccaggctc

SEQ ID NO: 297012 - DNA, 20 bp, synthetic construct
  source 1..20: mol_type = other DNA
cagccttgacctcccaggct

SEQ ID NO: 297013 - DNA, 20 bp, synthetic construct
  source 1..20: mol_type = other DNA
gcagccttgacctcccaggc

SEQ ID NO: 297014 - DNA, 20 bp, synthetic construct
  source 1..20: mol_type = other DNA
tgcagccttgacctcccagg

SEQ ID NO: 297015 - DNA, 20 bp, synthetic construct
  source 1..20: mol_type = other DNA
ctgcagccttgacctcccag

SEQ ID NO: 297016 - DNA, 20 bp, synthetic construct
  source 1..20: mol_type = other DNA
actgcagccttgacctccca

SEQ ID NO: 297017 - DNA, 20 bp, synthetic construct
  source 1..20: mol_type = other DNA
cactgcagccttgacctccc

SEQ ID NO: 297018 - DNA, 20 bp, synthetic construct
  source 1..20: mol_type = other DNA
tcactgcagccttgacctcc

SEQ ID NO: 297019 - DNA, 20 bp, synthetic construct
  source 1..20: mol_type = other DNA
ctcactgcagccttgacctc

SEQ ID NO: 297020 - DNA, 20 bp, synthetic construct
  source 1..20: mol_type = other DNA
cctcactgcagccttgacct

SEQ ID NO: 297021 - DNA, 20 bp, synthetic construct
  source 1..20: mol_type = other DNA
acctcactgcagccttgacc

SEQ ID NO: 297022 - DNA, 20 bp, synthetic construct
  source 1..20: mol_type = other DNA
cacctcactgcagccttgac

SEQ ID NO: 297023 - DNA, 20 bp, synthetic construct
  source 1..20: mol_type = other DNA
tcacctcactgcagccttga

SEQ ID NO: 297024 - DNA, 20 bp, synthetic construct
  source 1..20: mol_type = other DNA
ctcacctcactgcagccttg

SEQ ID NO: 297025 - DNA, 20 bp, synthetic construct
  source 1..20: mol_type = other DNA
tctcacctcactgcagcctt

SEQ ID NO: 297026 - DNA, 20 bp, synthetic construct
  source 1..20: mol_type = other DNA
atctcacctcactgcagcct

SEQ ID NO: 297027 - DNA, 20 bp, synthetic construct
  source 1..20: mol_type = other DNA
aatctcacctcactgcagcc

SEQ ID NO: 297028 - DNA, 20 bp, synthetic construct
  source 1..20: mol_type = other DNA
caatctcacctcactgcagc

SEQ ID NO: 297029 - DNA, 20 bp, synthetic construct
  source 1..20: mol_type = other DNA
acaatctcacctcactgcag

SEQ ID NO: 297030 - DNA, 20 bp, synthetic construct
  source 1..20: mol_type = other DNA
cacaatctcacctcactgca

SEQ ID NO: 297031 - DNA, 20 bp, synthetic construct
  source 1..20: mol_type = other DNA
gcacaatctcacctcactgc

SEQ ID NO: 297032 - DNA, 20 bp, synthetic construct
  source 1..20: mol_type = other DNA
ggcacaatctcacctcactg

SEQ ID NO: 297033 - DNA, 20 bp, synthetic construct
  source 1..20: mol_type = other DNA
tggcacaatctcacctcact

SEQ ID NO: 297034 - DNA, 20 bp, synthetic construct
  source 1..20: mol_type = other DNA
gtggcacaatctcacctcac

SEQ ID NO: 297035 - DNA, 20 bp, synthetic construct
  source 1..20: mol_type = other DNA
ggtggcacaatctcacctca

SEQ ID NO: 297036 - DNA, 20 bp, synthetic construct
  source 1..20: mol_type = other DNA
cggtggcacaatctcacctc

SEQ ID NO: 297037 - DNA, 20 bp, synthetic construct
  source 1..20: mol_type = other DNA
gcggtggcacaatctcacct

SEQ ID NO: 297038 - DNA, 20 bp, synthetic construct
  source 1..20: mol_type = other DNA
tgcggtggcacaatctcacc

SEQ ID NO: 297039 - DNA, 20 bp, synthetic construct
  source 1..20: mol_type = other DNA
gtgcggtggcacaatctcac

SEQ ID NO: 297040 - DNA, 20 bp, synthetic construct
  source 1..20: mol_type = other DNA
agtgcggtggcacaatctca

SEQ ID NO: 297041 - DNA, 20 bp, synthetic construct
  source 1..20: mol_type = other DNA
gagtgcggtggcacaatctc

SEQ ID NO: 297042 - DNA, 20 bp, synthetic construct
  source 1..20: mol_type = other DNA
agagtgcggtggcacaatct

SEQ ID NO: 297043 - DNA, 20 bp, synthetic construct
  source 1..20: mol_type = other DNA
tagagtgcggtggcacaatc

SEQ ID NO: 297044 - DNA, 20 bp, synthetic construct
  source 1..20: mol_type = other DNA
ctagagtgcggtggcacaat

SEQ ID NO: 297045 - DNA, 20 bp, synthetic construct
  source 1..20: mol_type = other DNA
gctagagtgcggtggcacaa

SEQ ID NO: 297046 - DNA, 20 bp, synthetic construct
  source 1..20: mol_type = other DNA
ggctagagtgcggtggcaca

SEQ ID NO: 297047 - DNA, 20 bp, synthetic construct
  source 1..20: mol_type = other DNA
aggctagagtgcggtggcac

SEQ ID NO: 297048 - DNA, 20 bp, synthetic construct
  source 1..20: mol_type = other DNA
caggctagagtgcggtggca

SEQ ID NO: 297049 - DNA, 20 bp, synthetic construct
  source 1..20: mol_type = other DNA
ccaggctagagtgcggtggc

SEQ ID NO: 297050 - DNA, 20 bp, synthetic construct
  source 1..20: mol_type = other DNA
cccaggctagagtgcggtgg

SEQ ID NO: 297051 - DNA, 20 bp, synthetic construct
  source 1..20: mol_type = other DNA
gcccaggctagagtgcggtg

SEQ ID NO: 297052 - DNA, 20 bp, synthetic construct
  source 1..20: mol_type = other DNA
cgcccaggctagagtgcggt

SEQ ID NO: 297053 - DNA, 20 bp, synthetic construct
  source 1..20: mol_type = other DNA
tcgcccaggctagagtgcgg

SEQ ID NO: 297054 - DNA, 20 bp, synthetic construct
  source 1..20: mol_type = other DNA
atcgcccaggctagagtgcg

SEQ ID NO: 297055 - DNA, 20 bp, synthetic construct
  source 1..20: mol_type = other DNA
tatcgcccaggctagagtgc

SEQ ID NO: 297056 - DNA, 20 bp, synthetic construct
  source 1..20: mol_type = other DNA
ctatcgcccaggctagagtg

SEQ ID NO: 297057 - DNA, 20 bp, synthetic construct
  source 1..20: mol_type = other DNA
tctatcgcccaggctagagt

SEQ ID NO: 297058 - DNA, 20 bp, synthetic construct
  source 1..20: mol_type = other DNA
ctctatcgcccaggctagag

SEQ ID NO: 297059 - DNA, 20 bp, synthetic construct
  source 1..20: mol_type = other DNA
gctctatcgcccaggctaga

SEQ ID NO: 297060 - DNA, 20 bp, synthetic construct
  source 1..20: mol_type = other DNA
tgctctatcgcccaggctag

SEQ ID NO: 297061 - DNA, 20 bp, synthetic construct
  source 1..20: mol_type = other DNA
ttgctctatcgcccaggcta

SEQ ID NO: 297062 - DNA, 20 bp, synthetic construct
  source 1..20: mol_type = other DNA
cttgctctatcgcccaggct

SEQ ID NO: 297063 - DNA, 20 bp, synthetic construct
  source 1..20: mol_type = other DNA
tcttgctctatcgcccaggc

SEQ ID NO: 297064 - DNA, 20 bp, synthetic construct
  source 1..20: mol_type = other DNA
gtcttgctctatcgcccagg

SEQ ID NO: 297065 - DNA, 20 bp, synthetic construct
  source 1..20: mol_type = other DNA
ggtcttgctctatcgcccag

SEQ ID NO: 297066 - DNA, 20 bp, synthetic construct
  source 1..20: mol_type = other DNA
gggtcttgctctatcgccca

SEQ ID NO: 297067 - DNA, 20 bp, synthetic construct
  source 1..20: mol_type = other DNA
agggtcttgctctatcgccc

SEQ ID NO: 297068 - DNA, 20 bp, synthetic construct
  source 1..20: mol_type = other DNA
cagggtcttgctctatcgcc

SEQ ID NO: 297069 - DNA, 20 bp, synthetic construct
  source 1..20: mol_type = other DNA
acagggtcttgctctatcgc

SEQ ID NO: 297070 - DNA, 20 bp, synthetic construct
  source 1..20: mol_type = other DNA
gacagggtcttgctctatcg

SEQ ID NO: 297071 - DNA, 20 bp, synthetic construct
  source 1..20: mol_type = other DNA
agacagggtcttgctctatc

SEQ ID NO: 297072 - DNA, 20 bp, synthetic construct
  source 1..20: mol_type = other DNA
gagacagggtcttgctctat

SEQ ID NO: 297073 - DNA, 20 bp, synthetic construct
  source 1..20: mol_type = other DNA
tgagacagggtcttgctcta

SEQ ID NO: 297074 - DNA, 20 bp, synthetic construct
  source 1..20: mol_type = other DNA
ttgagacagggtcttgctct

SEQ ID NO: 297075 - DNA, 20 bp, synthetic construct
  source 1..20: mol_type = other DNA
tttgagacagggtcttgctc

SEQ ID NO: 297076 - DNA, 20 bp, synthetic construct
  source 1..20: mol_type = other DNA
ttttgagacagggtcttgct

SEQ ID NO: 297077 - DNA, 20 bp, synthetic construct
  source 1..20: mol_type = other DNA
tttttgagacagggtcttgc

SEQ ID NO: 297078 - DNA, 20 bp, synthetic construct
  source 1..20: mol_type = other DNA
gtttttgagacagggtcttg

SEQ ID NO: 297079 - DNA, 20 bp, synthetic construct
  source 1..20: mol_type = other DNA
tgtttttgagacagggtctt

SEQ ID NO: 297080 - DNA, 20 bp, synthetic construct
  source 1..20: mol_type = other DNA
ttgtttttgagacagggtct

SEQ ID NO: 297081 - DNA, 20 bp, synthetic construct
  source 1..20: mol_type = other DNA
tttgtttttgagacagggtc

SEQ ID NO: 297082 - DNA, 20 bp, synthetic construct
  source 1..20: mol_type = other DNA
gtttgtttttgagacagggt

SEQ ID NO: 297083 - DNA, 20 bp, synthetic construct
  source 1..20: mol_type = other DNA
tgtttgtttttgagacaggg

SEQ ID NO: 297084 - DNA, 20 bp, synthetic construct
  source 1..20: mol_type = other DNA
ttgtttgtttttgagacagg

SEQ ID NO: 297085 - DNA, 20 bp, synthetic construct
  source 1..20: mol_type = other DNA
tttgtttgtttttgagacag

SEQ ID NO: 297086 - DNA, 20 bp, synthetic construct
  source 1..20: mol_type = other DNA
ttttgtttgtttttgagaca

SEQ ID NO: 297087 - DNA, 20 bp, synthetic construct
  source 1..20: mol_type = other DNA
tttttgtttgtttttgagac

SEQ ID NO: 297088 - DNA, 20 bp, synthetic construct
  source 1..20: mol_type = other DNA
ttttttgtttgtttttgaga

SEQ ID NO: 297089 - DNA, 20 bp, synthetic construct
  source 1..20: mol_type = other DNA
gttttttgtttgtttttgag

SEQ ID NO: 297090 - DNA, 20 bp, synthetic construct
  source 1..20: mol_type = other DNA
tgttttttgtttgtttttga

SEQ ID NO: 297091 - DNA, 20 bp, synthetic construct
  source 1..20: mol_type = other DNA
ctgttttttgtttgtttttg

SEQ ID NO: 297092 - DNA, 20 bp, synthetic construct
  source 1..20: mol_type = other DNA
actgttttttgtttgttttt

SEQ ID NO: 297093 - DNA, 20 bp, synthetic construct
  source 1..20: mol_type = other DNA
gactgttttttgtttgtttt

SEQ ID NO: 297094 - DNA, 20 bp, synthetic construct
  source 1..20: mol_type = other DNA
ggactgttttttgtttgttt

SEQ ID NO: 297095 - DNA, 20 bp, synthetic construct
  source 1..20: mol_type = other DNA
gggactgttttttgtttgtt

SEQ ID NO: 297096 - DNA, 20 bp, synthetic construct
  source 1..20: mol_type = other DNA
agggactgttttttgtttgt

SEQ ID NO: 297097 - DNA, 20 bp, synthetic construct
  source 1..20: mol_type = other DNA
cagggactgttttttgtttg

SEQ ID NO: 297098 - DNA, 20 bp, synthetic construct
  source 1..20: mol_type = other DNA
ccagggactgttttttgttt

SEQ ID NO: 297099 - DNA, 20 bp, synthetic construct
  source 1..20: mol_type = other DNA
gccagggactgttttttgtt

SEQ ID NO: 297100 - DNA, 20 bp, synthetic construct
  source 1..20: mol_type = other DNA
tgccagggactgttttttgt

SEQ ID NO: 297101 - DNA, 20 bp, synthetic construct
  source 1..20: mol_type = other DNA
gtgccagggactgttttttg

SEQ ID NO: 297102 - DNA, 20 bp, synthetic construct
  source 1..20: mol_type = other DNA
agtgccagggactgtttttt

SEQ ID NO: 297103 - DNA, 20 bp, synthetic construct
  source 1..20: mol_type = other DNA
gagtgccagggactgttttt

SEQ ID NO: 297104 - DNA, 20 bp, synthetic construct
  source 1..20: mol_type = other DNA
agagtgccagggactgtttt

SEQ ID NO: 297105 - DNA, 20 bp, synthetic construct
  source 1..20: mol_type = other DNA
cagagtgccagggactgttt

SEQ ID NO: 297106 - DNA, 20 bp, synthetic construct
  source 1..20: mol_type = other DNA
ccagagtgccagggactgtt

SEQ ID NO: 297107 - DNA, 20 bp, synthetic construct
  source 1..20: mol_type = other DNA
cccagagtgccagggactgt

SEQ ID NO: 297108 - DNA, 20 bp, synthetic construct
  source 1..20: mol_type = other DNA
gcccagagtgccagggactg

SEQ ID NO: 297109 - DNA, 20 bp, synthetic construct
  source 1..20: mol_type = other DNA
ggcccagagtgccagggact

SEQ ID NO: 297110 - DNA, 20 bp, synthetic construct
  source 1..20: mol_type = other DNA
tggcccagagtgccagggac

SEQ ID NO: 297111 - DNA, 20 bp, synthetic construct
  source 1..20: mol_type = other DNA
ctggcccagagtgccaggga

SEQ ID NO: 297112 - DNA, 20 bp, synthetic construct
  source 1..20: mol_type = other DNA
cctggcccagagtgccaggg

SEQ ID NO: 297113 - DNA, 20 bp, synthetic construct
  source 1..20: mol_type = other DNA
gcctggcccagagtgccagg

SEQ ID NO: 297114 - DNA, 20 bp, synthetic construct
  source 1..20: mol_type = other DNA
ggcctggcccagagtgccag

SEQ ID NO: 297115 - DNA, 20 bp, synthetic construct
  source 1..20: mol_type = other DNA
aggcctggcccagagtgcca

SEQ ID NO: 297116 - DNA, 20 bp, synthetic construct
  source 1..20: mol_type = other DNA
caggcctggcccagagtgcc

SEQ ID NO: 297117 - DNA, 20 bp, synthetic construct
  source 1..20: mol_type = other DNA
ccaggcctggcccagagtgc

SEQ ID NO: 297118 - DNA, 20 bp, synthetic construct
  source 1..20: mol_type = other DNA
gccaggcctggcccagagtg

SEQ ID NO: 297119 - DNA, 20 bp, synthetic construct
  source 1..20: mol_type = other DNA
tgccaggcctggcccagagt

SEQ ID NO: 297120 - DNA, 20 bp, synthetic construct
  source 1..20: mol_type = other DNA
ctgccaggcctggcccagag

SEQ ID NO: 297121 - DNA, 20 bp, synthetic construct
  source 1..20: mol_type = other DNA
cctgccaggcctggcccaga

SEQ ID NO: 297122 - DNA, 20 bp, synthetic construct
  source 1..20: mol_type = other DNA
ccctgccaggcctggcccag

SEQ ID NO: 297123 - DNA, 20 bp, synthetic construct
  source 1..20: mol_type = other DNA
gccctgccaggcctggccca

SEQ ID NO: 297124 - DNA, 20 bp, synthetic construct
  source 1..20: mol_type = other DNA
tgccctgccaggcctggccc

SEQ ID NO: 297125 - DNA, 20 bp, synthetic construct
  source 1..20: mol_type = other DNA
ctgccctgccaggcctggcc

SEQ ID NO: 297126 - DNA, 20 bp, synthetic construct
  source 1..20: mol_type = other DNA
actgccctgccaggcctggc

SEQ ID NO: 297127 - DNA, 20 bp, synthetic construct
  source 1..20: mol_type = other DNA
aactgccctgccaggcctgg

SEQ ID NO: 297128 - DNA, 20 bp, synthetic construct
  source 1..20: mol_type = other DNA
caactgccctgccaggcctg

SEQ ID NO: 297129 - DNA, 20 bp, synthetic construct
  source 1..20: mol_type = other DNA
ccaactgccctgccaggcct

SEQ ID NO: 297130 - DNA, 20 bp, synthetic construct
  source 1..20: mol_type = other DNA
gccaactgccctgccaggcc

SEQ ID NO: 297131 - DNA, 20 bp, synthetic construct
  source 1..20: mol_type = other DNA
tgccaactgccctgccaggc

SEQ ID NO: 297132 - DNA, 20 bp, synthetic construct
  source 1..20: mol_type = other DNA
ctgccaactgccctgccagg

SEQ ID NO: 297133 - DNA, 20 bp, synthetic construct
  source 1..20: mol_type = other DNA
cctgccaactgccctgccag

SEQ ID NO: 297134 - DNA, 20 bp, synthetic construct
  source 1..20: mol_type = other DNA
ccctgccaactgccctgcca

SEQ ID NO: 297135 - DNA, 20 bp, synthetic construct
  source 1..20: mol_type = other DNA
gccctgccaactgccctgcc

SEQ ID NO: 297136 - DNA, 20 bp, synthetic construct
  source 1..20: mol_type = other DNA
agccctgccaactgccctgc

SEQ ID NO: 297137 - DNA, 20 bp, synthetic construct
  source 1..20: mol_type = other DNA
cagccctgccaactgccctg

SEQ ID NO: 297138 - DNA, 20 bp, synthetic construct
  source 1..20: mol_type = other DNA
ccagccctgccaactgccct

SEQ ID NO: 297139 - DNA, 20 bp, synthetic construct
  source 1..20: mol_type = other DNA
accagccctgccaactgccc

SEQ ID NO: 297140 - DNA, 20 bp, synthetic construct
  source 1..20: mol_type = other DNA
gaccagccctgccaactgcc

SEQ ID NO: 297141 - DNA, 20 bp, synthetic construct
  source 1..20: mol_type = other DNA
agaccagccctgccaactgc

SEQ ID NO: 297142 - DNA, 20 bp, synthetic construct
  source 1..20: mol_type = other DNA
aagaccagccctgccaactg

SEQ ID NO: 297143 - DNA, 20 bp, synthetic construct
  source 1..20: mol_type = other DNA
aaagaccagccctgccaact

SEQ ID NO: 297144 - DNA, 20 bp, synthetic construct
  source 1..20: mol_type = other DNA
gaaagaccagccctgccaac

SEQ ID NO: 297145 - DNA, 20 bp, synthetic construct
  source 1..20: mol_type = other DNA
agaaagaccagccctgccaa

SEQ ID NO: 297146 - DNA, 20 bp, synthetic construct
  source 1..20: mol_type = other DNA
gagaaagaccagccctgcca

SEQ ID NO: 297147 - DNA, 20 bp, synthetic construct
  source 1..20: mol_type = other DNA
agagaaagaccagccctgcc

SEQ ID NO: 297148 - DNA, 20 bp, synthetic construct
  source 1..20: mol_type = other DNA
cagagaaagaccagccctgc

SEQ ID NO: 297149 - DNA, 20 bp, synthetic construct
  source 1..20: mol_type = other DNA
ccagagaaagaccagccctg

SEQ ID NO: 297150 - DNA, 20 bp, synthetic construct
  source 1..20: mol_type = other DNA
gccagagaaagaccagccct

SEQ ID NO: 297151 - DNA, 20 bp, synthetic construct
  source 1..20: mol_type = other DNA
tgccagagaaagaccagccc

SEQ ID NO: 297152 - DNA, 20 bp, synthetic construct
  source 1..20: mol_type = other DNA
gtgccagagaaagaccagcc

SEQ ID NO: 297153 - DNA, 20 bp, synthetic construct
  source 1..20: mol_type = other DNA
agtgccagagaaagaccagc

SEQ ID NO: 297154 - DNA, 20 bp, synthetic construct
  source 1..20: mol_type = other DNA
aagtgccagagaaagaccag

SEQ ID NO: 297155 - DNA, 20 bp, synthetic construct
  source 1..20: mol_type = other DNA
gaagtgccagagaaagacca

SEQ ID NO: 297156 - DNA, 20 bp, synthetic construct
  source 1..20: mol_type = other DNA
tgaagtgccagagaaagacc

SEQ ID NO: 297157 - DNA, 20 bp, synthetic construct
  source 1..20: mol_type = other DNA
atgaagtgccagagaaagac

SEQ ID NO: 297158 - DNA, 20 bp, synthetic construct
  source 1..20: mol_type = other DNA
gatgaagtgccagagaaaga

SEQ ID NO: 297159 - DNA, 20 bp, synthetic construct
  source 1..20: mol_type = other DNA
agatgaagtgccagagaaag

SEQ ID NO: 297160 - DNA, 20 bp, synthetic construct
  source 1..20: mol_type = other DNA
gagatgaagtgccagagaaa

SEQ ID NO: 297161 - DNA, 20 bp, synthetic construct
  source 1..20: mol_type = other DNA
tgagatgaagtgccagagaa

SEQ ID NO: 297162 - DNA, 20 bp, synthetic construct
  source 1..20: mol_type = other DNA
gtgagatgaagtgccagaga

SEQ ID NO: 297163 - DNA, 20 bp, synthetic construct
  source 1..20: mol_type = other DNA
ggtgagatgaagtgccagag

SEQ ID NO: 297164 - DNA, 20 bp, synthetic construct
  source 1..20: mol_type = other DNA
gggtgagatgaagtgccaga

SEQ ID NO: 297165 - DNA, 20 bp, synthetic construct
  source 1..20: mol_type = other DNA
agggtgagatgaagtgccag

SEQ ID NO: 297166 - DNA, 20 bp, synthetic construct
  source 1..20: mol_type = other DNA
gagggtgagatgaagtgcca

SEQ ID NO: 297167 - DNA, 20 bp, synthetic construct
  source 1..20: mol_type = other DNA
ggagggtgagatgaagtgcc

SEQ ID NO: 297168 - DNA, 20 bp, synthetic construct
  source 1..20: mol_type = other DNA
gggagggtgagatgaagtgc

SEQ ID NO: 297169 - DNA, 20 bp, synthetic construct
  source 1..20: mol_type = other DNA
agggagggtgagatgaagtg

SEQ ID NO: 297170 - DNA, 20 bp, synthetic construct
  source 1..20: mol_type = other DNA
gagggagggtgagatgaagt

SEQ ID NO: 297171 - DNA, 20 bp, synthetic construct
  source 1..20: mol_type = other DNA
ggagggagggtgagatgaag

SEQ ID NO: 297172 - DNA, 20 bp, synthetic construct
  source 1..20: mol_type = other DNA
gggagggagggtgagatgaa

SEQ ID NO: 297173 - DNA, 20 bp, synthetic construct
  source 1..20: mol_type = other DNA
agggagggagggtgagatga

SEQ ID NO: 297174 - DNA, 20 bp, synthetic construct
  source 1..20: mol_type = other DNA
aagggagggagggtgagatg

SEQ ID NO: 297175 - DNA, 20 bp, synthetic construct
  source 1..20: mol_type = other DNA
gaagggagggagggtgagat

SEQ ID NO: 297176 - DNA, 20 bp, synthetic construct
  source 1..20: mol_type = other DNA
ggaagggagggagggtgaga

SEQ ID NO: 297177 - DNA, 20 bp, synthetic construct
  source 1..20: mol_type = other DNA
aggaagggagggagggtgag

SEQ ID NO: 297178 - DNA, 20 bp, synthetic construct
  source 1..20: mol_type = other DNA
gaggaagggagggagggtga

SEQ ID NO: 297179 - DNA, 20 bp, synthetic construct
  source 1..20: mol_type = other DNA
agaggaagggagggagggtg

SEQ ID NO: 297180 - DNA, 20 bp, synthetic construct
  source 1..20: mol_type = other DNA
aagaggaagggagggagggt

SEQ ID NO: 297181 - DNA, 20 bp, synthetic construct
  source 1..20: mol_type = other DNA
gaagaggaagggagggaggg

SEQ ID NO: 297182 - DNA, 20 bp, synthetic construct
  source 1..20: mol_type = other DNA
agaagaggaagggagggagg

SEQ ID NO: 297183 - DNA, 20 bp, synthetic construct
  source 1..20: mol_type = other DNA
aagaagaggaagggagggag

SEQ ID NO: 297184 - DNA, 20 bp, synthetic construct
  source 1..20: mol_type = other DNA
caagaagaggaagggaggga

SEQ ID NO: 297185 - DNA, 20 bp, synthetic construct
  source 1..20: mol_type = other DNA
gcaagaagaggaagggaggg

SEQ ID NO: 297186 - DNA, 20 bp, synthetic construct
  source 1..20: mol_type = other DNA
tgcaagaagaggaagggagg

SEQ ID NO: 297187 - DNA, 20 bp, synthetic construct
  source 1..20: mol_type = other DNA
ctgcaagaagaggaagggag

SEQ ID NO: 297188 - DNA, 20 bp, synthetic construct
  source 1..20: mol_type = other DNA
tctgcaagaagaggaaggga

SEQ ID NO: 297189 - DNA, 20 bp, synthetic construct
  source 1..20: mol_type = other DNA
atctgcaagaagaggaaggg

SEQ ID NO: 297190 - DNA, 20 bp, synthetic construct
  source 1..20: mol_type = other DNA
aatctgcaagaagaggaagg

SEQ ID NO: 297191 - DNA, 20 bp, synthetic construct
  source 1..20: mol_type = other DNA
caatctgcaagaagaggaag

SEQ ID NO: 297192 - DNA, 20 bp, synthetic construct
  source 1..20: mol_type = other DNA
tcaatctgcaagaagaggaa

SEQ ID NO: 297193 - DNA, 20 bp, synthetic construct
  source 1..20: mol_type = other DNA
ttcaatctgcaagaagagga

SEQ ID NO: 297194 - DNA, 20 bp, synthetic construct
  source 1..20: mol_type = other DNA
tttcaatctgcaagaagagg

SEQ ID NO: 297195 - DNA, 20 bp, synthetic construct
  source 1..20: mol_type = other DNA
gtttcaatctgcaagaagag

SEQ ID NO: 297196 - DNA, 20 bp, synthetic construct
  source 1..20: mol_type = other DNA
ggtttcaatctgcaagaaga

SEQ ID NO: 297197 - DNA, 20 bp, synthetic construct
  source 1..20: mol_type = other DNA
gggtttcaatctgcaagaag

SEQ ID NO: 297198 - DNA, 20 bp, synthetic construct
  source 1..20: mol_type = other DNA
tgggtttcaatctgcaagaa

SEQ ID NO: 297199 - DNA, 20 bp, synthetic construct
  source 1..20: mol_type = other DNA
gtgggtttcaatctgcaaga

SEQ ID NO: 297200 - DNA, 20 bp, synthetic construct
  source 1..20: mol_type = other DNA
tgtgggtttcaatctgcaag

SEQ ID NO: 297201 - DNA, 20 bp, synthetic construct
  source 1..20: mol_type = other DNA
ttgtgggtttcaatctgcaa

SEQ ID NO: 297202 - DNA, 20 bp, synthetic construct
  source 1..20: mol_type = other DNA
cttgtgggtttcaatctgca

SEQ ID NO: 297203 - DNA, 20 bp, synthetic construct
  source 1..20: mol_type = other DNA
gcttgtgggtttcaatctgc

SEQ ID NO: 297204 - DNA, 20 bp, synthetic construct
  source 1..20: mol_type = other DNA
agcttgtgggtttcaatctg

SEQ ID NO: 297205 - DNA, 20 bp, synthetic construct
  source 1..20: mol_type = other DNA
cagcttgtgggtttcaatct

SEQ ID NO: 297206 - DNA, 20 bp, synthetic construct
  source 1..20: mol_type = other DNA
tcagcttgtgggtttcaatc

SEQ ID NO: 297207 - DNA, 20 bp, synthetic construct
  source 1..20: mol_type = other DNA
gtcagcttgtgggtttcaat

SEQ ID NO: 297208 - DNA, 20 bp, synthetic construct
  source 1..20: mol_type = other DNA
ggtcagcttgtgggtttcaa

SEQ ID NO: 297209 - DNA, 20 bp, synthetic construct
  source 1..20: mol_type = other DNA
aggtcagcttgtgggtttca

SEQ ID NO: 297210 - DNA, 20 bp, synthetic construct
  source 1..20: mol_type = other DNA
aaggtcagcttgtgggtttc

SEQ ID NO: 297211 - DNA, 20 bp, synthetic construct
  source 1..20: mol_type = other DNA
gaaggtcagcttgtgggttt

SEQ ID NO: 297212 - DNA, 20 bp, synthetic construct
  source 1..20: mol_type = other DNA
ggaaggtcagcttgtgggtt

SEQ ID NO: 297213 - DNA, 20 bp, synthetic construct
  source 1..20: mol_type = other DNA
cggaaggtcagcttgtgggt

SEQ ID NO: 297214 - DNA, 20 bp, synthetic construct
  source 1..20: mol_type = other DNA
gcggaaggtcagcttgtggg

SEQ ID NO: 297215 - DNA, 20 bp, synthetic construct
  source 1..20: mol_type = other DNA
cgcggaaggtcagcttgtgg

SEQ ID NO: 297216 - DNA, 20 bp, synthetic construct
  source 1..20: mol_type = other DNA
tcgcggaaggtcagcttgtg

SEQ ID NO: 297217 - DNA, 20 bp, synthetic construct
  source 1..20: mol_type = other DNA
ctcgcggaaggtcagcttgt

SEQ ID NO: 297218 - DNA, 20 bp, synthetic construct
  source 1..20: mol_type = other DNA
tctcgcggaaggtcagcttg

SEQ ID NO: 297219 - DNA, 20 bp, synthetic construct
  source 1..20: mol_type = other DNA
ttctcgcggaaggtcagctt

SEQ ID NO: 297220 - DNA, 20 bp, synthetic construct
  source 1..20: mol_type = other DNA
gttctcgcggaaggtcagct

SEQ ID NO: 297221 - DNA, 20 bp, synthetic construct
  source 1..20: mol_type = other DNA
cgttctcgcggaaggtcagc

SEQ ID NO: 297222 - DNA, 20 bp, synthetic construct
  source 1..20: mol_type = other DNA
gcgttctcgcggaaggtcag

SEQ ID NO: 297223 - DNA, 20 bp, synthetic construct
  source 1..20: mol_type = other DNA
ggcgttctcgcggaaggtca

SEQ ID NO: 297224 - DNA, 20 bp, synthetic construct
  source 1..20: mol_type = other DNA
tggcgttctcgcggaaggtc

SEQ ID NO: 297225 - DNA, 20 bp, synthetic construct
  source 1..20: mol_type = other DNA
ttggcgttctcgcggaaggt

SEQ ID NO: 297226 - DNA, 20 bp, synthetic construct
  source 1..20: mol_type = other DNA
tttggcgttctcgcggaagg

SEQ ID NO: 297227 - DNA, 20 bp, synthetic construct
  source 1..20: mol_type = other DNA
ctttggcgttctcgcggaag

SEQ ID NO: 297228 - DNA, 20 bp, synthetic construct
  source 1..20: mol_type = other DNA
gctttggcgttctcgcggaa

SEQ ID NO: 297229 - DNA, 20 bp, synthetic construct
  source 1..20: mol_type = other DNA
ggctttggcgttctcgcgga

SEQ ID NO: 297230 - DNA, 20 bp, synthetic construct
  source 1..20: mol_type = other DNA
tggctttggcgttctcgcgg

SEQ ID NO: 297231 - DNA, 20 bp, synthetic construct
  source 1..20: mol_type = other DNA
ttggctttggcgttctcgcg

SEQ ID NO: 297232 - DNA, 20 bp, synthetic construct
  source 1..20: mol_type = other DNA
cttggctttggcgttctcgc

SEQ ID NO: 297233 - DNA, 20 bp, synthetic construct
  source 1..20: mol_type = other DNA
tcttggctttggcgttctcg

SEQ ID NO: 297234 - DNA, 20 bp, synthetic construct
  source 1..20: mol_type = other DNA
gtcttggctttggcgttctc

SEQ ID NO: 297235 - DNA, 20 bp, synthetic construct
  source 1..20: mol_type = other DNA
tgtcttggctttggcgttct

SEQ ID NO: 297236 - DNA, 20 bp, synthetic construct
  source 1..20: mol_type = other DNA
ctgtcttggctttggcgttc

SEQ ID NO: 297237 - DNA, 20 bp, synthetic construct
  source 1..20: mol_type = other DNA
tctgtcttggctttggcgtt

SEQ ID NO: 297238 - DNA, 20 bp, synthetic construct
  source 1..20: mol_type = other DNA
gtctgtcttggctttggcgt

SEQ ID NO: 297239 - DNA, 20 bp, synthetic construct
  source 1..20: mol_type = other DNA
ggtctgtcttggctttggcg

SEQ ID NO: 297240 - DNA, 20 bp, synthetic construct
  source 1..20: mol_type = other DNA
tggtctgtcttggctttggc

SEQ ID NO: 297241 - DNA, 20 bp, synthetic construct
  source 1..20: mol_type = other DNA
gtggtctgtcttggctttgg

SEQ ID NO: 297242 - DNA, 20 bp, synthetic construct
  source 1..20: mol_type = other DNA
cgtggtctgtcttggctttg

SEQ ID NO: 297243 - DNA, 20 bp, synthetic construct
  source 1..20: mol_type = other DNA
ccgtggtctgtcttggcttt

SEQ ID NO: 297244 - DNA, 20 bp, synthetic construct
  source 1..20: mol_type = other DNA
cccgtggtctgtcttggctt

SEQ ID NO: 297245 - DNA, 20 bp, synthetic construct
  source 1..20: mol_type = other DNA
ccccgtggtctgtcttggct

SEQ ID NO: 297246 - DNA, 20 bp, synthetic construct
  source 1..20: mol_type = other DNA
gccccgtggtctgtcttggc

SEQ ID NO: 297247 - DNA, 20 bp, synthetic construct
  source 1..20: mol_type = other DNA
cgccccgtggtctgtcttgg

SEQ ID NO: 297248 - DNA, 20 bp, synthetic construct
  source 1..20: mol_type = other DNA
ccgccccgtggtctgtcttg

SEQ ID NO: 297249 - DNA, 20 bp, synthetic construct
  source 1..20: mol_type = other DNA
tccgccccgtggtctgtctt

SEQ ID NO: 297250 - DNA, 20 bp, synthetic construct
  source 1..20: mol_type = other DNA
ctccgccccgtggtctgtct

SEQ ID NO: 297251 - DNA, 20 bp, synthetic construct
  source 1..20: mol_type = other DNA
tctccgccccgtggtctgtc

SEQ ID NO: 297252 - DNA, 20 bp, synthetic construct
  source 1..20: mol_type = other DNA
atctccgccccgtggtctgt

SEQ ID NO: 297253 - DNA, 20 bp, synthetic construct
  source 1..20: mol_type = other DNA
gatctccgccccgtggtctg

SEQ ID NO: 297254 - DNA, 20 bp, synthetic construct
  source 1..20: mol_type = other DNA
cgatctccgccccgtggtct

SEQ ID NO: 297255 - DNA, 20 bp, synthetic construct
  source 1..20: mol_type = other DNA
acgatctccgccccgtggtc

SEQ ID NO: 297256 - DNA, 20 bp, synthetic construct
  source 1..20: mol_type = other DNA
cacgatctccgccccgtggt

SEQ ID NO: 297257 - DNA, 20 bp, synthetic construct
  source 1..20: mol_type = other DNA
acacgatctccgccccgtgg

SEQ ID NO: 297258 - DNA, 20 bp, synthetic construct
  source 1..20: mol_type = other DNA
tacacgatctccgccccgtg

SEQ ID NO: 297259 - DNA, 20 bp, synthetic construct
  source 1..20: mol_type = other DNA
gtacacgatctccgccccgt

SEQ ID NO: 297260 - DNA, 20 bp, synthetic construct
  source 1..20: mol_type = other DNA
tgtacacgatctccgccccg

SEQ ID NO: 297261 - DNA, 20 bp, synthetic construct
  source 1..20: mol_type = other DNA
ttgtacacgatctccgcccc

SEQ ID NO: 297262 - DNA, 20 bp, synthetic construct
  source 1..20: mol_type = other DNA
cttgtacacgatctccgccc

SEQ ID NO: 297263 - DNA, 20 bp, synthetic construct
  source 1..20: mol_type = other DNA
acttgtacacgatctccgcc

SEQ ID NO: 297264 - DNA, 20 bp, synthetic construct
  source 1..20: mol_type = other DNA
gacttgtacacgatctccgc

SEQ ID NO: 297265 - DNA, 20 bp, synthetic construct
  source 1..20: mol_type = other DNA
cgacttgtacacgatctccg

SEQ ID NO: 297266 - DNA, 20 bp, synthetic construct
  source 1..20: mol_type = other DNA
gcgacttgtacacgatctcc

SEQ ID NO: 297267 - DNA, 20 bp, synthetic construct
  source 1..20: mol_type = other DNA
ggcgacttgtacacgatctc

SEQ ID NO: 297268 - DNA, 20 bp, synthetic construct
  source 1..20: mol_type = other DNA
tggcgacttgtacacgatct

SEQ ID NO: 297269 - DNA, 20 bp, synthetic construct
  source 1..20: mol_type = other DNA
ctggcgacttgtacacgatc

SEQ ID NO: 297270 - DNA, 20 bp, synthetic construct
  source 1..20: mol_type = other DNA
actggcgacttgtacacgat

SEQ ID NO: 297271 - DNA, 20 bp, synthetic construct
  source 1..20: mol_type = other DNA
cactggcgacttgtacacga

SEQ ID NO: 297272 - DNA, 20 bp, synthetic construct
  source 1..20: mol_type = other DNA
ccactggcgacttgtacacg

SEQ ID NO: 297273 - DNA, 20 bp, synthetic construct
  source 1..20: mol_type = other DNA
accactggcgacttgtacac

SEQ ID NO: 297274 - DNA, 20 bp, synthetic construct
  source 1..20: mol_type = other DNA
caccactggcgacttgtaca

SEQ ID NO: 297275 - DNA, 20 bp, synthetic construct
  source 1..20: mol_type = other DNA
acaccactggcgacttgtac

SEQ ID NO: 297276 - DNA, 20 bp, synthetic construct
  source 1..20: mol_type = other DNA
gacaccactggcgacttgta

SEQ ID NO: 297277 - DNA, 20 bp, synthetic construct
  source 1..20: mol_type = other DNA
agacaccactggcgacttgt

SEQ ID NO: 297278 - DNA, 20 bp, synthetic construct
  source 1..20: mol_type = other DNA
cagacaccactggcgacttg

SEQ ID NO: 297279 - DNA, 20 bp, synthetic construct
  source 1..20: mol_type = other DNA
ccagacaccactggcgactt

SEQ ID NO: 297280 - DNA, 20 bp, synthetic construct
  source 1..20: mol_type = other DNA
cccagacaccactggcgact

SEQ ID NO: 297281 - DNA, 20 bp, synthetic construct
  source 1..20: mol_type = other DNA
ccccagacaccactggcgac

SEQ ID NO: 297282 - DNA, 20 bp, synthetic construct
  source 1..20: mol_type = other DNA
tccccagacaccactggcga

SEQ ID NO: 297283 - DNA, 20 bp, synthetic construct
  source 1..20: mol_type = other DNA
gtccccagacaccactggcg

SEQ ID NO: 297284 - DNA, 20 bp, synthetic construct
  source 1..20: mol_type = other DNA
tgtccccagacaccactggc

SEQ ID NO: 297285 - DNA, 20 bp, synthetic construct
  source 1..20: mol_type = other DNA
gtgtccccagacaccactgg

SEQ ID NO: 297286 - DNA, 20 bp, synthetic construct
  source 1..20: mol_type = other DNA
cgtgtccccagacaccactg

SEQ ID NO: 297287 - DNA, 20 bp, synthetic construct
  source 1..20: mol_type = other DNA
acgtgtccccagacaccact

SEQ ID NO: 297288 - DNA, 20 bp, synthetic construct
  source 1..20: mol_type = other DNA
gacgtgtccccagacaccac

SEQ ID NO: 297289 - DNA, 20 bp, synthetic construct
  source 1..20: mol_type = other DNA
agacgtgtccccagacacca

SEQ ID NO: 297290 - DNA, 20 bp, synthetic construct
  source 1..20: mol_type = other DNA
gagacgtgtccccagacacc

SEQ ID NO: 297291 - DNA, 20 bp, synthetic construct
  source 1..20: mol_type = other DNA
ggagacgtgtccccagacac

SEQ ID NO: 297292 - DNA, 20 bp, synthetic construct
  source 1..20: mol_type = other DNA
tggagacgtgtccccagaca

SEQ ID NO: 297293 - DNA, 20 bp, synthetic construct
  source 1..20: mol_type = other DNA
gtggagacgtgtccccagac

SEQ ID NO: 297294 - DNA, 20 bp, synthetic construct
  source 1..20: mol_type = other DNA
cgtggagacgtgtccccaga

SEQ ID NO: 297295 - DNA, 20 bp, synthetic construct
  source 1..20: mol_type = other DNA
ccgtggagacgtgtccccag

SEQ ID NO: 297296 - DNA, 20 bp, synthetic construct
  source 1..20: mol_type = other DNA
gccgtggagacgtgtcccca

SEQ ID NO: 297297 - DNA, 20 bp, synthetic construct
  source 1..20: mol_type = other DNA
tgccgtggagacgtgtcccc

SEQ ID NO: 297298 - DNA, 20 bp, synthetic construct
  source 1..20: mol_type = other DNA
atgccgtggagacgtgtccc

SEQ ID NO: 297299 - DNA, 20 bp, synthetic construct
  source 1..20: mol_type = other DNA
gatgccgtggagacgtgtcc

SEQ ID NO: 297300 - DNA, 20 bp, synthetic construct
  source 1..20: mol_type = other DNA
agatgccgtggagacgtgtc

SEQ ID NO: 297301 - DNA, 20 bp, synthetic construct
  source 1..20: mol_type = other DNA
gagatgccgtggagacgtgt

SEQ ID NO: 297302 - DNA, 20 bp, synthetic construct
  source 1..20: mol_type = other DNA
tgagatgccgtggagacgtg

SEQ ID NO: 297303 - DNA, 20 bp, synthetic construct
  source 1..20: mol_type = other DNA
ctgagatgccgtggagacgt

SEQ ID NO: 297304 - DNA, 20 bp, synthetic construct
  source 1..20: mol_type = other DNA
gctgagatgccgtggagacg

SEQ ID NO: 297305 - DNA, 20 bp, synthetic construct
  source 1..20: mol_type = other DNA
tgctgagatgccgtggagac

SEQ ID NO: 297306 - DNA, 20 bp, synthetic construct
  source 1..20: mol_type = other DNA
ttgctgagatgccgtggaga

SEQ ID NO: 297307 - DNA, 20 bp, synthetic construct
  source 1..20: mol_type = other DNA
attgctgagatgccgtggag

SEQ ID NO: 297308 - DNA, 20 bp, synthetic construct
  source 1..20: mol_type = other DNA
cattgctgagatgccgtgga

SEQ ID NO: 297309 - DNA, 20 bp, synthetic construct
  source 1..20: mol_type = other DNA
acattgctgagatgccgtgg

SEQ ID NO: 297310 - DNA, 20 bp, synthetic construct
  source 1..20: mol_type = other DNA
gacattgctgagatgccgtg

SEQ ID NO: 297311 - DNA, 20 bp, synthetic construct
  source 1..20: mol_type = other DNA
agacattgctgagatgccgt

SEQ ID NO: 297312 - DNA, 20 bp, synthetic construct
  source 1..20: mol_type = other DNA
gagacattgctgagatgccg

SEQ ID NO: 297313 - DNA, 20 bp, synthetic construct
  source 1..20: mol_type = other DNA
ggagacattgctgagatgcc

SEQ ID NO: 297314 - DNA, 20 bp, synthetic construct
  source 1..20: mol_type = other DNA
aggagacattgctgagatgc

SEQ ID NO: 297315 - DNA, 20 bp, synthetic construct
  source 1..20: mol_type = other DNA
gaggagacattgctgagatg

SEQ ID NO: 297316 - DNA, 20 bp, synthetic construct
  source 1..20: mol_type = other DNA
ggaggagacattgctgagat

SEQ ID NO: 297317 - DNA, 20 bp, synthetic construct
  source 1..20: mol_type = other DNA
tggaggagacattgctgaga

SEQ ID NO: 297318 - DNA, 20 bp, synthetic construct
  source 1..20: mol_type = other DNA
gtggaggagacattgctgag

SEQ ID NO: 297319 - DNA, 20 bp, synthetic construct
  source 1..20: mol_type = other DNA
ggtggaggagacattgctga

SEQ ID NO: 297320 - DNA, 20 bp, synthetic construct
  source 1..20: mol_type = other DNA
cggtggaggagacattgctg

SEQ ID NO: 297321 - DNA, 20 bp, synthetic construct
  source 1..20: mol_type = other DNA
ccggtggaggagacattgct

SEQ ID NO: 297322 - DNA, 20 bp, synthetic construct
  source 1..20: mol_type = other DNA
gccggtggaggagacattgc

SEQ ID NO: 297323 - DNA, 20 bp, synthetic construct
  source 1..20: mol_type = other DNA
tgccggtggaggagacattg

SEQ ID NO: 297324 - DNA, 20 bp, synthetic construct
  source 1..20: mol_type = other DNA
ctgccggtggaggagacatt

SEQ ID NO: 297325 - DNA, 20 bp, synthetic construct
  source 1..20: mol_type = other DNA
gctgccggtggaggagacat

SEQ ID NO: 297326 - DNA, 20 bp, synthetic construct
  source 1..20: mol_type = other DNA
tgctgccggtggaggagaca

SEQ ID NO: 297327 - DNA, 20 bp, synthetic construct
  source 1..20: mol_type = other DNA
atgctgccggtggaggagac

SEQ ID NO: 297328 - DNA, 20 bp, synthetic construct
  source 1..20: mol_type = other DNA
gatgctgccggtggaggaga

SEQ ID NO: 297329 - DNA, 20 bp, synthetic construct
  source 1..20: mol_type = other DNA
cgatgctgccggtggaggag

SEQ ID NO: 297330 - DNA, 20 bp, synthetic construct
  source 1..20: mol_type = other DNA
tcgatgctgccggtggagga

SEQ ID NO: 297331 - DNA, 20 bp, synthetic construct
  source 1..20: mol_type = other DNA
gtcgatgctgccggtggagg

SEQ ID NO: 297332 - DNA, 20 bp, synthetic construct
  source 1..20: mol_type = other DNA
tgtcgatgctgccggtggag

SEQ ID NO: 297333 - DNA, 20 bp, synthetic construct
  source 1..20: mol_type = other DNA
atgtcgatgctgccggtgga

SEQ ID NO: 297334 - DNA, 20 bp, synthetic construct
  source 1..20: mol_type = other DNA
catgtcgatgctgccggtgg

SEQ ID NO: 297335 - DNA, 20 bp, synthetic construct
  source 1..20: mol_type = other DNA
ccatgtcgatgctgccggtg

SEQ ID NO: 297336 - DNA, 20 bp, synthetic construct
  source 1..20: mol_type = other DNA
accatgtcgatgctgccggt

SEQ ID NO: 297337 - DNA, 20 bp, synthetic construct
  source 1..20: mol_type = other DNA
taccatgtcgatgctgccgg

SEQ ID NO: 297338 - DNA, 20 bp, synthetic construct
  source 1..20: mol_type = other DNA
ctaccatgtcgatgctgccg

SEQ ID NO: 297339 - DNA, 20 bp, synthetic construct
  source 1..20: mol_type = other DNA
tctaccatgtcgatgctgcc

SEQ ID NO: 297340 - DNA, 20 bp, synthetic construct
  source 1..20: mol_type = other DNA
gtctaccatgtcgatgctgc

SEQ ID NO: 297341 - DNA, 20 bp, synthetic construct
  source 1..20: mol_type = other DNA
agtctaccatgtcgatgctg

SEQ ID NO: 297342 - DNA, 20 bp, synthetic construct
  source 1..20: mol_type = other DNA
gagtctaccatgtcgatgct

SEQ ID NO: 297343 - DNA, 20 bp, synthetic construct
  source 1..20: mol_type = other DNA
cgagtctaccatgtcgatgc

SEQ ID NO: 297344 - DNA, 20 bp, synthetic construct
  source 1..20: mol_type = other DNA
gcgagtctaccatgtcgatg

SEQ ID NO: 297345 - DNA, 20 bp, synthetic construct
  source 1..20: mol_type = other DNA
ggcgagtctaccatgtcgat

SEQ ID NO: 297346 - DNA, 20 bp, synthetic construct
  source 1..20: mol_type = other DNA
gggcgagtctaccatgtcga

SEQ ID NO: 297347 - DNA, 20 bp, synthetic construct
  source 1..20: mol_type = other DNA
ggggcgagtctaccatgtcg

SEQ ID NO: 297348 - DNA, 20 bp, synthetic construct
  source 1..20: mol_type = other DNA
tggggcgagtctaccatgtc

SEQ ID NO: 297349 - DNA, 20 bp, synthetic construct
  source 1..20: mol_type = other DNA
ctggggcgagtctaccatgt

SEQ ID NO: 297350 - DNA, 20 bp, synthetic construct
  source 1..20: mol_type = other DNA
gctggggcgagtctaccatg

SEQ ID NO: 297351 - DNA, 20 bp, synthetic construct
  source 1..20: mol_type = other DNA
agctggggcgagtctaccat

SEQ ID NO: 297352 - DNA, 20 bp, synthetic construct
  source 1..20: mol_type = other DNA
gagctggggcgagtctacca

SEQ ID NO: 297353 - DNA, 20 bp, synthetic construct
  source 1..20: mol_type = other DNA
cgagctggggcgagtctacc

SEQ ID NO: 297354 - DNA, 20 bp, synthetic construct
  source 1..20: mol_type = other DNA
gcgagctggggcgagtctac

SEQ ID NO: 297355 - DNA, 20 bp, synthetic construct
  source 1..20: mol_type = other DNA
ggcgagctggggcgagtcta

SEQ ID NO: 297356 - DNA, 20 bp, synthetic construct
  source 1..20: mol_type = other DNA
tggcgagctggggcgagtct

SEQ ID NO: 297357 - DNA, 20 bp, synthetic construct
  source 1..20: mol_type = other DNA
gtggcgagctggggcgagtc

SEQ ID NO: 297358 - DNA, 20 bp, synthetic construct
  source 1..20: mol_type = other DNA
cgtggcgagctggggcgagt

SEQ ID NO: 297359 - DNA, 20 bp, synthetic construct
  source 1..20: mol_type = other DNA
gcgtggcgagctggggcgag

SEQ ID NO: 297360 - DNA, 20 bp, synthetic construct
  source 1..20: mol_type = other DNA
agcgtggcgagctggggcga

SEQ ID NO: 297361 - DNA, 20 bp, synthetic construct
  source 1..20: mol_type = other DNA
tagcgtggcgagctggggcg

SEQ ID NO: 297362 - DNA, 20 bp, synthetic construct
  source 1..20: mol_type = other DNA
ctagcgtggcgagctggggc

SEQ ID NO: 297363 - DNA, 20 bp, synthetic construct
  source 1..20: mol_type = other DNA
gctagcgtggcgagctgggg

SEQ ID NO: 297364 - DNA, 20 bp, synthetic construct
  source 1..20: mol_type = other DNA
agctagcgtggcgagctggg

SEQ ID NO: 297365 - DNA, 20 bp, synthetic construct
  source 1..20: mol_type = other DNA
cagctagcgtggcgagctgg

SEQ ID NO: 297366 - DNA, 20 bp, synthetic construct
  source 1..20: mol_type = other DNA
tcagctagcgtggcgagctg

SEQ ID NO: 297367 - DNA, 20 bp, synthetic construct
  source 1..20: mol_type = other DNA
gtcagctagcgtggcgagct

SEQ ID NO: 297368 - DNA, 20 bp, synthetic construct
  source 1..20: mol_type = other DNA
cgtcagctagcgtggcgagc

SEQ ID NO: 297369 - DNA, 20 bp, synthetic construct
  source 1..20: mol_type = other DNA
tcgtcagctagcgtggcgag

SEQ ID NO: 297370 - DNA, 20 bp, synthetic construct
  source 1..20: mol_type = other DNA
ctcgtcagctagcgtggcga

SEQ ID NO: 297371 - DNA, 20 bp, synthetic construct
  source 1..20: mol_type = other DNA
cctcgtcagctagcgtggcg

SEQ ID NO: 297372 - DNA, 20 bp, synthetic construct
  source 1..20: mol_type = other DNA
acctcgtcagctagcgtggc

SEQ ID NO: 297373 - DNA, 20 bp, synthetic construct
  source 1..20: mol_type = other DNA
cacctcgtcagctagcgtgg

SEQ ID NO: 297374 - DNA, 20 bp, synthetic construct
  source 1..20: mol_type = other DNA
acacctcgtcagctagcgtg

SEQ ID NO: 297375 - DNA, 20 bp, synthetic construct
  source 1..20: mol_type = other DNA
gacacctcgtcagctagcgt

SEQ ID NO: 297376 - DNA, 20 bp, synthetic construct
  source 1..20: mol_type = other DNA
agacacctcgtcagctagcg

SEQ ID NO: 297377 - DNA, 20 bp, synthetic construct
  source 1..20: mol_type = other DNA
cagacacctcgtcagctagc

SEQ ID NO: 297378 - DNA, 20 bp, synthetic construct
  source 1..20: mol_type = other DNA
gcagacacctcgtcagctag

SEQ ID NO: 297379 - DNA, 20 bp, synthetic construct
  source 1..20: mol_type = other DNA
ggcagacacctcgtcagcta

SEQ ID NO: 297380 - DNA, 20 bp, synthetic construct
  source 1..20: mol_type = other DNA
aggcagacacctcgtcagct

SEQ ID NO: 297381 - DNA, 20 bp, synthetic construct
  source 1..20: mol_type = other DNA
gaggcagacacctcgtcagc

SEQ ID NO: 297382 - DNA, 20 bp, synthetic construct
  source 1..20: mol_type = other DNA
ggaggcagacacctcgtcag

SEQ ID NO: 297383 - DNA, 20 bp, synthetic construct
  source 1..20: mol_type = other DNA
gggaggcagacacctcgtca

SEQ ID NO: 297384 - DNA, 20 bp, synthetic construct
  source 1..20: mol_type = other DNA
agggaggcagacacctcgtc

SEQ ID NO: 297385 - DNA, 20 bp, synthetic construct
  source 1..20: mol_type = other DNA
cagggaggcagacacctcgt

SEQ ID NO: 297386 - DNA, 20 bp, synthetic construct
  source 1..20: mol_type = other DNA
ccagggaggcagacacctcg

SEQ ID NO: 297387 - DNA, 20 bp, synthetic construct
  source 1..20: mol_type = other DNA
gccagggaggcagacacctc

SEQ ID NO: 297388 - DNA, 20 bp, synthetic construct
  source 1..20: mol_type = other DNA
ggccagggaggcagacacct

SEQ ID NO: 297389 - DNA, 20 bp, synthetic construct
  source 1..20: mol_type = other DNA
tggccagggaggcagacacc

SEQ ID NO: 297390 - DNA, 20 bp, synthetic construct
  source 1..20: mol_type = other DNA
ttggccagggaggcagacac

SEQ ID NO: 297391 - DNA, 20 bp, synthetic construct
  source 1..20: mol_type = other DNA
cttggccagggaggcagaca

SEQ ID NO: 297392 - DNA, 20 bp, synthetic construct
  source 1..20: mol_type = other DNA
gcttggccagggaggcagac

SEQ ID NO: 297393 - DNA, 20 bp, synthetic construct
  source 1..20: mol_type = other DNA
tgcttggccagggaggcaga

SEQ ID NO: 297394 - DNA, 20 bp, synthetic construct
  source 1..20: mol_type = other DNA
ctgcttggccagggaggcag

SEQ ID NO: 297395 - DNA, 20 bp, synthetic construct
  source 1..20: mol_type = other DNA
cctgcttggccagggaggca

SEQ ID NO: 297396 - DNA, 20 bp, synthetic construct
  source 1..20: mol_type = other DNA
ccctgcttggccagggaggc

SEQ ID NO: 297397 - DNA, 20 bp, synthetic construct
  source 1..20: mol_type = other DNA
accctgcttggccagggagg

SEQ ID NO: 297398 - DNA, 20 bp, synthetic construct
  source 1..20: mol_type = other DNA
aaccctgcttggccagggag

SEQ ID NO: 297399 - DNA, 20 bp, synthetic construct
  source 1..20: mol_type = other DNA
aaaccctgcttggccaggga

SEQ ID NO: 297400 - DNA, 20 bp, synthetic construct
  source 1..20: mol_type = other DNA
caaaccctgcttggccaggg

SEQ ID NO: 297401 - DNA, 20 bp, synthetic construct
  source 1..20: mol_type = other DNA
acaaaccctgcttggccagg

SEQ ID NO: 297402 - DNA, 20 bp, synthetic construct
  source 1..20: mol_type = other DNA
cacaaaccctgcttggccag

SEQ ID NO: 297403 - DNA, 20 bp, synthetic construct
  source 1..20: mol_type = other DNA
tcacaaaccctgcttggcca

SEQ ID NO: 297404 - DNA, 20 bp, synthetic construct
  source 1..20: mol_type = other DNA
atcacaaaccctgcttggcc

SEQ ID NO: 297405 - DNA, 20 bp, synthetic construct
  source 1..20: mol_type = other DNA
gatcacaaaccctgcttggc

SEQ ID NO: 297406 - DNA, 20 bp, synthetic construct
  source 1..20: mol_type = other DNA
tgatcacaaaccctgcttgg

SEQ ID NO: 297407 - DNA, 20 bp, synthetic construct
  source 1..20: mol_type = other DNA
ctgatcacaaaccctgcttg

SEQ ID NO: 297408 - DNA, 20 bp, synthetic construct
  source 1..20: mol_type = other DNA
cctgatcacaaaccctgctt

SEQ ID NO: 297409 - DNA, 20 bp, synthetic construct
  source 1..20: mol_type = other DNA
gcctgatcacaaaccctgct

SEQ ID NO: 297410 - DNA, 20 bp, synthetic construct
  source 1..20: mol_type = other DNA
ggcctgatcacaaaccctgc

SEQ ID NO: 297411 - DNA, 20 bp, synthetic construct
  source 1..20: mol_type = other DNA
gggcctgatcacaaaccctg

SEQ ID NO: 297412 - DNA, 20 bp, synthetic construct
  source 1..20: mol_type = other DNA
ggggcctgatcacaaaccct

SEQ ID NO: 297413 - DNA, 20 bp, synthetic construct
  source 1..20: mol_type = other DNA
aggggcctgatcacaaaccc

SEQ ID NO: 297414 - DNA, 20 bp, synthetic construct
  source 1..20: mol_type = other DNA
caggggcctgatcacaaacc

SEQ ID NO: 297415 - DNA, 20 bp, synthetic construct
  source 1..20: mol_type = other DNA
ccaggggcctgatcacaaac

SEQ ID NO: 297416 - DNA, 20 bp, synthetic construct
  source 1..20: mol_type = other DNA
cccaggggcctgatcacaaa

SEQ ID NO: 297417 - DNA, 20 bp, synthetic construct
  source 1..20: mol_type = other DNA
ccccaggggcctgatcacaa

SEQ ID NO: 297418 - DNA, 20 bp, synthetic construct
  source 1..20: mol_type = other DNA
gccccaggggcctgatcaca

SEQ ID NO: 297419 - DNA, 20 bp, synthetic construct
  source 1..20: mol_type = other DNA
cgccccaggggcctgatcac

SEQ ID NO: 297420 - DNA, 20 bp, synthetic construct
  source 1..20: mol_type = other DNA
ccgccccaggggcctgatca

SEQ ID NO: 297421 - DNA, 20 bp, synthetic construct
  source 1..20: mol_type = other DNA
accgccccaggggcctgatc

SEQ ID NO: 297422 - DNA, 20 bp, synthetic construct
  source 1..20: mol_type = other DNA
gaccgccccaggggcctgat

SEQ ID NO: 297423 - DNA, 20 bp, synthetic construct
  source 1..20: mol_type = other DNA
tgaccgccccaggggcctga

SEQ ID NO: 297424 - DNA, 20 bp, synthetic construct
  source 1..20: mol_type = other DNA
ttgaccgccccaggggcctg

SEQ ID NO: 297425 - DNA, 20 bp, synthetic construct
  source 1..20: mol_type = other DNA
attgaccgccccaggggcct

SEQ ID NO: 297426 - DNA, 20 bp, synthetic construct
  source 1..20: mol_type = other DNA
tattgaccgccccaggggcc

SEQ ID NO: 297427 - DNA, 20 bp, synthetic construct
  source 1..20: mol_type = other DNA
ttattgaccgccccaggggc

SEQ ID NO: 297428 - DNA, 20 bp, synthetic construct
  source 1..20: mol_type = other DNA
attattgaccgccccagggg

SEQ ID NO: 297429 - DNA, 20 bp, synthetic construct
  source 1..20: mol_type = other DNA
aattattgaccgccccaggg

SEQ ID NO: 297430 - DNA, 20 bp, synthetic construct
  source 1..20: mol_type = other DNA
caattattgaccgccccagg

SEQ ID NO: 297431 - DNA, 20 bp, synthetic construct
  source 1..20: mol_type = other DNA
acaattattgaccgccccag

SEQ ID NO: 297432 - DNA, 20 bp, synthetic construct
  source 1..20: mol_type = other DNA
cacaattattgaccgcccca

SEQ ID NO: 297433 - DNA, 20 bp, synthetic construct
  source 1..20: mol_type = other DNA
ccacaattattgaccgcccc

SEQ ID NO: 297434 - DNA, 20 bp, synthetic construct
  source 1..20: mol_type = other DNA
tccacaattattgaccgccc

SEQ ID NO: 297435 - DNA, 20 bp, synthetic construct
  source 1..20: mol_type = other DNA
ctccacaattattgaccgcc

SEQ ID NO: 297436 - DNA, 20 bp, synthetic construct
  source 1..20: mol_type = other DNA
tctccacaattattgaccgc

SEQ ID NO: 297437 - DNA, 20 bp, synthetic construct
  source 1..20: mol_type = other DNA
ctctccacaattattgaccg

SEQ ID NO: 297438 - DNA, 20 bp, synthetic construct
  source 1..20: mol_type = other DNA
cctctccacaattattgacc

SEQ ID NO: 297439 - DNA, 20 bp, synthetic construct
  source 1..20: mol_type = other DNA
tcctctccacaattattgac

SEQ ID NO: 297440 - DNA, 20 bp, synthetic construct
  source 1..20: mol_type = other DNA
ctcctctccacaattattga

SEQ ID NO: 297441 - DNA, 20 bp, synthetic construct
  source 1..20: mol_type = other DNA
tctcctctccacaattattg

SEQ ID NO: 297442 - DNA, 20 bp, synthetic construct
  source 1..20: mol_type = other DNA
ctctcctctccacaattatt

SEQ ID NO: 297443 - DNA, 20 bp, synthetic construct
  source 1..20: mol_type = other DNA
tctctcctctccacaattat

SEQ ID NO: 297444 - DNA, 20 bp, synthetic construct
  source 1..20: mol_type = other DNA
ttctctcctctccacaatta

SEQ ID NO: 297445 - DNA, 20 bp, synthetic construct
  source 1..20: mol_type = other DNA
attctctcctctccacaatt

SEQ ID NO: 297446 - DNA, 20 bp, synthetic construct
  source 1..20: mol_type = other DNA
cattctctcctctccacaat

SEQ ID NO: 297447 - DNA, 20 bp, synthetic construct
  source 1..20: mol_type = other DNA
tcattctctcctctccacaa

SEQ ID NO: 297448 - DNA, 20 bp, synthetic construct
  source 1..20: mol_type = other DNA
ctcattctctcctctccaca

SEQ ID NO: 297449 - DNA, 20 bp, synthetic construct
  source 1..20: mol_type = other DNA
tctcattctctcctctccac

SEQ ID NO: 297450 - DNA, 20 bp, synthetic construct
  source 1..20: mol_type = other DNA
ctctcattctctcctctcca

SEQ ID NO: 297451 - DNA, 20 bp, synthetic construct
  source 1..20: mol_type = other DNA
tctctcattctctcctctcc

SEQ ID NO: 297452 - DNA, 20 bp, synthetic construct
  source 1..20: mol_type = other DNA
ctctctcattctctcctctc

SEQ ID NO: 297453 - DNA, 20 bp, synthetic construct
  source 1..20: mol_type = other DNA
actctctcattctctcctct

SEQ ID NO: 297454 - DNA, 20 bp, synthetic construct
  source 1..20: mol_type = other DNA
cactctctcattctctcctc

SEQ ID NO: 297455 - DNA, 20 bp, synthetic construct
  source 1..20: mol_type = other DNA
acactctctcattctctcct

SEQ ID NO: 297456 - DNA, 20 bp, synthetic construct
  source 1..20: mol_type = other DNA
cacactctctcattctctcc

SEQ ID NO: 297457 - DNA, 20 bp, synthetic construct
  source 1..20: mol_type = other DNA
ccacactctctcattctctc

SEQ ID NO: 297458 - DNA, 20 bp, synthetic construct
  source 1..20: mol_type = other DNA
tccacactctctcattctct

SEQ ID NO: 297459 - DNA, 20 bp, synthetic construct
  source 1..20: mol_type = other DNA
ttccacactctctcattctc

SEQ ID NO: 297460 - DNA, 20 bp, synthetic construct
  source 1..20: mol_type = other DNA
tttccacactctctcattct

SEQ ID NO: 297461 - DNA, 20 bp, synthetic construct
  source 1..20: mol_type = other DNA
ttttccacactctctcattc

SEQ ID NO: 297462 - DNA, 20 bp, synthetic construct
  source 1..20: mol_type = other DNA
tttttccacactctctcatt

SEQ ID NO: 297463 - DNA, 20 bp, synthetic construct
  source 1..20: mol_type = other DNA
ttttttccacactctctcat

SEQ ID NO: 297464 - DNA, 20 bp, synthetic construct
  source 1..20: mol_type = other DNA
tttttttccacactctctca

SEQ ID NO: 297465 - DNA, 20 bp, synthetic construct
  source 1..20: mol_type = other DNA
ttttttttccacactctctc

SEQ ID NO: 297466 - DNA, 20 bp, synthetic construct
  source 1..20: mol_type = other DNA
tttttttttccacactctct

SEQ ID NO: 297467 - DNA, 20 bp, synthetic construct
  source 1..20: mol_type = other DNA
ctttttttttccacactctc

SEQ ID NO: 297468 - DNA, 20 bp, synthetic construct
  source 1..20: mol_type = other DNA
tctttttttttccacactct

SEQ ID NO: 297469 - DNA, 20 bp, synthetic construct
  source 1..20: mol_type = other DNA
ttctttttttttccacactc

SEQ ID NO: 297470 - DNA, 20 bp, synthetic construct
  source 1..20: mol_type = other DNA
attctttttttttccacact

SEQ ID NO: 297471 - DNA, 20 bp, synthetic construct
  source 1..20: mol_type = other DNA
tattctttttttttccacac

SEQ ID NO: 297472 - DNA, 20 bp, synthetic construct
  source 1..20: mol_type = other DNA
ttattctttttttttccaca

SEQ ID NO: 297473 - DNA, 20 bp, synthetic construct
  source 1..20: mol_type = other DNA
attattctttttttttccac

SEQ ID NO: 297474 - DNA, 20 bp, synthetic construct
  source 1..20: mol_type = other DNA
cattattctttttttttcca

SEQ ID NO: 297475 - DNA, 20 bp, synthetic construct
  source 1..20: mol_type = other DNA
tcattattctttttttttcc

SEQ ID NO: 297476 - DNA, 20 bp, synthetic construct
  source 1..20: mol_type = other DNA
gtcattattctttttttttc

SEQ ID NO: 297477 - DNA, 20 bp, synthetic construct
  source 1..20: mol_type = other DNA
ggtcattattcttttttttt

SEQ ID NO: 297478 - DNA, 20 bp, synthetic construct
  source 1..20: mol_type = other DNA
gggtcattattctttttttt

SEQ ID NO: 297479 - DNA, 20 bp, synthetic construct
  source 1..20: mol_type = other DNA
cgggtcattattcttttttt

SEQ ID NO: 297480 - DNA, 20 bp, synthetic construct
  source 1..20: mol_type = other DNA
ccgggtcattattctttttt

SEQ ID NO: 297481 - DNA, 20 bp, synthetic construct
  source 1..20: mol_type = other DNA
gccgggtcattattcttttt

SEQ ID NO: 297482 - DNA, 20 bp, synthetic construct
  source 1..20: mol_type = other DNA
ggccgggtcattattctttt

SEQ ID NO: 297483 - DNA, 20 bp, synthetic construct
  source 1..20: mol_type = other DNA
gggccgggtcattattcttt

SEQ ID NO: 297484 - DNA, 20 bp, synthetic construct
  source 1..20: mol_type = other DNA
ggggccgggtcattattctt

SEQ ID NO: 297485 - DNA, 20 bp, synthetic construct
  source 1..20: mol_type = other DNA
gggggccgggtcattattct

SEQ ID NO: 297486 - DNA, 20 bp, synthetic construct
  source 1..20: mol_type = other DNA
cgggggccgggtcattattc

SEQ ID NO: 297487 - DNA, 20 bp, synthetic construct
  source 1..20: mol_type = other DNA
gcgggggccgggtcattatt

SEQ ID NO: 297488 - DNA, 20 bp, synthetic construct
  source 1..20: mol_type = other DNA
ggcgggggccgggtcattat

SEQ ID NO: 297489 - DNA, 20 bp, synthetic construct
  source 1..20: mol_type = other DNA
gggcgggggccgggtcatta

SEQ ID NO: 297490 - DNA, 20 bp, synthetic construct
  source 1..20: mol_type = other DNA
agggcgggggccgggtcatt

SEQ ID NO: 297491 - DNA, 20 bp, synthetic construct
  source 1..20: mol_type = other DNA
gagggcgggggccgggtcat

SEQ ID NO: 297492 - DNA, 20 bp, synthetic construct
  source 1..20: mol_type = other DNA
agagggcgggggccgggtca

SEQ ID NO: 297493 - DNA, 20 bp, synthetic construct
  source 1..20: mol_type = other DNA
cagagggcgggggccgggtc

SEQ ID NO: 297494 - DNA, 20 bp, synthetic construct
  source 1..20: mol_type = other DNA
gcagagggcgggggccgggt

SEQ ID NO: 297495 - DNA, 20 bp, synthetic construct
  source 1..20: mol_type = other DNA
ggcagagggcgggggccggg

SEQ ID NO: 297496 - DNA, 20 bp, synthetic construct
  source 1..20: mol_type = other DNA
gggcagagggcgggggccgg

SEQ ID NO: 297497 - DNA, 20 bp, synthetic construct
  source 1..20: mol_type = other DNA
ggggcagagggcgggggccg

SEQ ID NO: 297498 - DNA, 20 bp, synthetic construct
  source 1..20: mol_type = other DNA
gggggcagagggcgggggcc

SEQ ID NO: 297499 - DNA, 20 bp, synthetic construct
  source 1..20: mol_type = other DNA
tgggggcagagggcgggggc

SEQ ID NO: 297500 - DNA, 20 bp, synthetic construct
  source 1..20: mol_type = other DNA
ctgggggcagagggcggggg

SEQ ID NO: 297501 - DNA, 20 bp, synthetic construct
  source 1..20: mol_type = other DNA
gctgggggcagagggcgggg

SEQ ID NO: 297502 - DNA, 20 bp, synthetic construct
  source 1..20: mol_type = other DNA
agctgggggcagagggcggg

SEQ ID NO: 297503 - DNA, 20 bp, synthetic construct
  source 1..20: mol_type = other DNA
cagctgggggcagagggcgg

SEQ ID NO: 297504 - DNA, 20 bp, synthetic construct
  source 1..20: mol_type = other DNA
gcagctgggggcagagggcg

SEQ ID NO: 297505 - DNA, 20 bp, synthetic construct
  source 1..20: mol_type = other DNA
agcagctgggggcagagggc

SEQ ID NO: 297506 - DNA, 20 bp, synthetic construct
  source 1..20: mol_type = other DNA
gagcagctgggggcagaggg

SEQ ID NO: 297507 - DNA, 20 bp, synthetic construct
  source 1..20: mol_type = other DNA
ggagcagctgggggcagagg

SEQ ID NO: 297508 - DNA, 20 bp, synthetic construct
  source 1..20: mol_type = other DNA
aggagcagctgggggcagag

SEQ ID NO: 297509 - DNA, 20 bp, synthetic construct
  source 1..20: mol_type = other DNA
gaggagcagctgggggcaga

SEQ ID NO: 297510 - DNA, 20 bp, synthetic construct
  source 1..20: mol_type = other DNA
cgaggagcagctgggggcag

SEQ ID NO: 297511 - DNA, 20 bp, synthetic construct
  source 1..20: mol_type = other DNA
gcgaggagcagctgggggca

SEQ ID NO: 297512 - DNA, 20 bp, synthetic construct
  source 1..20: mol_type = other DNA
tgcgaggagcagctgggggc

SEQ ID NO: 297513 - DNA, 20 bp, synthetic construct
  source 1..20: mol_type = other DNA
ctgcgaggagcagctggggg

SEQ ID NO: 297514 - DNA, 20 bp, synthetic construct
  source 1..20: mol_type = other DNA
actgcgaggagcagctgggg

SEQ ID NO: 297515 - DNA, 20 bp, synthetic construct
  source 1..20: mol_type = other DNA
aactgcgaggagcagctggg

SEQ ID NO: 297516 - DNA, 20 bp, synthetic construct
  source 1..20: mol_type = other DNA
gaactgcgaggagcagctgg

SEQ ID NO: 297517 - DNA, 20 bp, synthetic construct
  source 1..20: mol_type = other DNA
cgaactgcgaggagcagctg

SEQ ID NO: 297518 - DNA, 20 bp, synthetic construct
  source 1..20: mol_type = other DNA
ccgaactgcgaggagcagct

SEQ ID NO: 297519 - DNA, 20 bp, synthetic construct
  source 1..20: mol_type = other DNA
accgaactgcgaggagcagc

SEQ ID NO: 297520 - DNA, 20 bp, synthetic construct
  source 1..20: mol_type = other DNA
aaccgaactgcgaggagcag

SEQ ID NO: 297521 - DNA, 20 bp, synthetic construct
  source 1..20: mol_type = other DNA
taaccgaactgcgaggagca

SEQ ID NO: 297522 - DNA, 20 bp, synthetic construct
  source 1..20: mol_type = other DNA
ttaaccgaactgcgaggagc

SEQ ID NO: 297523 - DNA, 20 bp, synthetic construct
  source 1..20: mol_type = other DNA
attaaccgaactgcgaggag

SEQ ID NO: 297524 - DNA, 20 bp, synthetic construct
  source 1..20: mol_type = other DNA
aattaaccgaactgcgagga

SEQ ID NO: 297525 - DNA, 20 bp, synthetic construct
  source 1..20: mol_type = other DNA
caattaaccgaactgcgagg

SEQ ID NO: 297526 - DNA, 20 bp, synthetic construct
  source 1..20: mol_type = other DNA
ccaattaaccgaactgcgag

SEQ ID NO: 297527 - DNA, 20 bp, synthetic construct
  source 1..20: mol_type = other DNA
accaattaaccgaactgcga

SEQ ID NO: 297528 - DNA, 20 bp, synthetic construct
  source 1..20: mol_type = other DNA
aaccaattaaccgaactgcg

SEQ ID NO: 297529 - DNA, 20 bp, synthetic construct
  source 1..20: mol_type = other DNA
taaccaattaaccgaactgc

SEQ ID NO: 297530 - DNA, 20 bp, synthetic construct
  source 1..20: mol_type = other DNA
ttaaccaattaaccgaactg

SEQ ID NO: 297531 - DNA, 20 bp, synthetic construct
  source 1..20: mol_type = other DNA
attaaccaattaaccgaact

SEQ ID NO: 297532 - DNA, 20 bp, synthetic construct
  source 1..20: mol_type = other DNA
gattaaccaattaaccgaac

SEQ ID NO: 297533 - DNA, 20 bp, synthetic construct
  source 1..20: mol_type = other DNA
tgattaaccaattaaccgaa

SEQ ID NO: 297534 - DNA, 20 bp, synthetic construct
  source 1..20: mol_type = other DNA
gtgattaaccaattaaccga

SEQ ID NO: 297535 - DNA, 20 bp, synthetic construct
  source 1..20: mol_type = other DNA
agtgattaaccaattaaccg

SEQ ID NO: 297536 - DNA, 20 bp, synthetic construct
  source 1..20: mol_type = other DNA
aagtgattaaccaattaacc

SEQ ID NO: 297537 - DNA, 20 bp, synthetic construct
  source 1..20: mol_type = other DNA
taagtgattaaccaattaac

SEQ ID NO: 297538 - DNA, 20 bp, synthetic construct
  source 1..20: mol_type = other DNA
ttaagtgattaaccaattaa

SEQ ID NO: 297539 - DNA, 20 bp, synthetic construct
  source 1..20: mol_type = other DNA
gttaagtgattaaccaatta

SEQ ID NO: 297540 - DNA, 20 bp, synthetic construct
  source 1..20: mol_type = other DNA
ggttaagtgattaaccaatt

SEQ ID NO: 297541 - DNA, 20 bp, synthetic construct
  source 1..20: mol_type = other DNA
aggttaagtgattaaccaat

SEQ ID NO: 297542 - DNA, 20 bp, synthetic construct
  source 1..20: mol_type = other DNA
caggttaagtgattaaccaa

SEQ ID NO: 297543 - DNA, 20 bp, synthetic construct
  source 1..20: mol_type = other DNA
gcaggttaagtgattaacca

SEQ ID NO: 297544 - DNA, 20 bp, synthetic construct
  source 1..20: mol_type = other DNA
agcaggttaagtgattaacc

SEQ ID NO: 297545 - DNA, 20 bp, synthetic construct
  source 1..20: mol_type = other DNA
aagcaggttaagtgattaac

SEQ ID NO: 297546 - DNA, 20 bp, synthetic construct
  source 1..20: mol_type = other DNA
aaagcaggttaagtgattaa

SEQ ID NO: 297547 - DNA, 20 bp, synthetic construct
  source 1..20: mol_type = other DNA
aaaagcaggttaagtgatta

SEQ ID NO: 297548 - DNA, 20 bp, synthetic construct
  source 1..20: mol_type = other DNA
caaaagcaggttaagtgatt

SEQ ID NO: 297549 - DNA, 20 bp, synthetic construct
  source 1..20: mol_type = other DNA
acaaaagcaggttaagtgat

SEQ ID NO: 297550 - DNA, 20 bp, synthetic construct
  source 1..20: mol_type = other DNA
gacaaaagcaggttaagtga

SEQ ID NO: 297551 - DNA, 20 bp, synthetic construct
  source 1..20: mol_type = other DNA
tgacaaaagcaggttaagtg

SEQ ID NO: 297552 - DNA, 20 bp, synthetic construct
  source 1..20: mol_type = other DNA
gtgacaaaagcaggttaagt

SEQ ID NO: 297553 - DNA, 20 bp, synthetic construct
  source 1..20: mol_type = other DNA
agtgacaaaagcaggttaag

SEQ ID NO: 297554 - DNA, 20 bp, synthetic construct
  source 1..20: mol_type = other DNA
gagtgacaaaagcaggttaa

SEQ ID NO: 297555 - DNA, 20 bp, synthetic construct
  source 1..20: mol_type = other DNA
cgagtgacaaaagcaggtta

SEQ ID NO: 297556 - DNA, 20 bp, synthetic construct
  source 1..20: mol_type = other DNA
ccgagtgacaaaagcaggtt

SEQ ID NO: 297557 - DNA, 20 bp, synthetic construct
  source 1..20: mol_type = other DNA
gccgagtgacaaaagcaggt

SEQ ID NO: 297558 - DNA, 20 bp, synthetic construct
  source 1..20: mol_type = other DNA
agccgagtgacaaaagcagg

SEQ ID NO: 297559 - DNA, 20 bp, synthetic construct
  source 1..20: mol_type = other DNA
aagccgagtgacaaaagcag

SEQ ID NO: 297560 - DNA, 20 bp, synthetic construct
  source 1..20: mol_type = other DNA
aaagccgagtgacaaaagca

SEQ ID NO: 297561 - DNA, 20 bp, synthetic construct
  source 1..20: mol_type = other DNA
caaagccgagtgacaaaagc

SEQ ID NO: 297562 - DNA, 20 bp, synthetic construct
  source 1..20: mol_type = other DNA
ccaaagccgagtgacaaaag

SEQ ID NO: 297563 - DNA, 20 bp, synthetic construct
  source 1..20: mol_type = other DNA
gccaaagccgagtgacaaaa

SEQ ID NO: 297564 - DNA, 20 bp, synthetic construct
  source 1..20: mol_type = other DNA
agccaaagccgagtgacaaa

SEQ ID NO: 297565 - DNA, 20 bp, synthetic construct
  source 1..20: mol_type = other DNA
gagccaaagccgagtgacaa

SEQ ID NO: 297566 - DNA, 20 bp, synthetic construct
  source 1..20: mol_type = other DNA
cgagccaaagccgagtgaca

SEQ ID NO: 297567 - DNA, 20 bp, synthetic construct
  source 1..20: mol_type = other DNA
ccgagccaaagccgagtgac

SEQ ID NO: 297568 - DNA, 20 bp, synthetic construct
  source 1..20: mol_type = other DNA
cccgagccaaagccgagtga

SEQ ID NO: 297569 - DNA, 20 bp, synthetic construct
  source 1..20: mol_type = other DNA
tcccgagccaaagccgagtg

SEQ ID NO: 297570 - DNA, 20 bp, synthetic construct
  source 1..20: mol_type = other DNA
gtcccgagccaaagccgagt

SEQ ID NO: 297571 - DNA, 20 bp, synthetic construct
  source 1..20: mol_type = other DNA
agtcccgagccaaagccgag

SEQ ID NO: 297572 - DNA, 20 bp, synthetic construct
  source 1..20: mol_type = other DNA
aagtcccgagccaaagccga

SEQ ID NO: 297573 - DNA, 20 bp, synthetic construct
  source 1..20: mol_type = other DNA
gaagtcccgagccaaagccg

SEQ ID NO: 297574 - DNA, 20 bp, synthetic construct
  source 1..20: mol_type = other DNA
tgaagtcccgagccaaagcc

SEQ ID NO: 297575 - DNA, 20 bp, synthetic construct
  source 1..20: mol_type = other DNA
ttgaagtcccgagccaaagc

SEQ ID NO: 297576 - DNA, 20 bp, synthetic construct
  source 1..20: mol_type = other DNA
tttgaagtcccgagccaaag

SEQ ID NO: 297577 - DNA, 20 bp, synthetic construct
  source 1..20: mol_type = other DNA
ttttgaagtcccgagccaaa

SEQ ID NO: 297578 - DNA, 20 bp, synthetic construct
  source 1..20: mol_type = other DNA
attttgaagtcccgagccaa

SEQ ID NO: 297579 - DNA, 20 bp, synthetic construct
  source 1..20: mol_type = other DNA
gattttgaagtcccgagcca

SEQ ID NO: 297580 - DNA, 20 bp, synthetic construct
  source 1..20: mol_type = other DNA
tgattttgaagtcccgagcc

SEQ ID NO: 297581 - DNA, 20 bp, synthetic construct
  source 1..20: mol_type = other DNA
ctgattttgaagtcccgagc

SEQ ID NO: 297582 - DNA, 20 bp, synthetic construct
  source 1..20: mol_type = other DNA
actgattttgaagtcccgag

SEQ ID NO: 297583 - DNA, 20 bp, synthetic construct
  source 1..20: mol_type = other DNA
cactgattttgaagtcccga

SEQ ID NO: 297584 - DNA, 20 bp, synthetic construct
  source 1..20: mol_type = other DNA
tcactgattttgaagtcccg

SEQ ID NO: 297585 - DNA, 20 bp, synthetic construct
  source 1..20: mol_type = other DNA
atcactgattttgaagtccc

SEQ ID NO: 297586 - DNA, 20 bp, synthetic construct
  source 1..20: mol_type = other DNA
catcactgattttgaagtcc

SEQ ID NO: 297587 - DNA, 20 bp, synthetic construct
  source 1..20: mol_type = other DNA
ccatcactgattttgaagtc

SEQ ID NO: 297588 - DNA, 20 bp, synthetic construct
  source 1..20: mol_type = other DNA
cccatcactgattttgaagt

SEQ ID NO: 297589 - DNA, 20 bp, synthetic construct
  source 1..20: mol_type = other DNA
tcccatcactgattttgaag

SEQ ID NO: 297590 - DNA, 20 bp, synthetic construct
  source 1..20: mol_type = other DNA
ctcccatcactgattttgaa

SEQ ID NO: 297591 - DNA, 20 bp, synthetic construct
  source 1..20: mol_type = other DNA
actcccatcactgattttga

SEQ ID NO: 297592 - DNA, 20 bp, synthetic construct
  source 1..20: mol_type = other DNA
tactcccatcactgattttg

SEQ ID NO: 297593 - DNA, 20 bp, synthetic construct
  source 1..20: mol_type = other DNA
ttactcccatcactgatttt

SEQ ID NO: 297594 - DNA, 20 bp, synthetic construct
  source 1..20: mol_type = other DNA
cttactcccatcactgattt

SEQ ID NO: 297595 - DNA, 20 bp, synthetic construct
  source 1..20: mol_type = other DNA
tcttactcccatcactgatt

SEQ ID NO: 297596 - DNA, 20 bp, synthetic construct
  source 1..20: mol_type = other DNA
ctcttactcccatcactgat

SEQ ID NO: 297597 - DNA, 20 bp, synthetic construct
  source 1..20: mol_type = other DNA
gctcttactcccatcactga

SEQ ID NO: 297598 - DNA, 20 bp, synthetic construct
  source 1..20: mol_type = other DNA
tgctcttactcccatcactg

SEQ ID NO: 297599 - DNA, 20 bp, synthetic construct
  source 1..20: mol_type = other DNA
ttgctcttactcccatcact

SEQ ID NO: 297600 - DNA, 20 bp, synthetic construct
  source 1..20: mol_type = other DNA
tttgctcttactcccatcac

SEQ ID NO: 297601 - DNA, 20 bp, synthetic construct
  source 1..20: mol_type = other DNA
atttgctcttactcccatca

SEQ ID NO: 297602 - DNA, 20 bp, synthetic construct
  source 1..20: mol_type = other DNA
aatttgctcttactcccatc

SEQ ID NO: 297603 - DNA, 20 bp, synthetic construct
  source 1..20: mol_type = other DNA
aaatttgctcttactcccat

SEQ ID NO: 297604 - DNA, 20 bp, synthetic construct
  source 1..20: mol_type = other DNA
gaaatttgctcttactccca

SEQ ID NO: 297605 - DNA, 20 bp, synthetic construct
  source 1..20: mol_type = other DNA
tgaaatttgctcttactccc

SEQ ID NO: 297606 - DNA, 20 bp, synthetic construct
  source 1..20: mol_type = other DNA
atgaaatttgctcttactcc

SEQ ID NO: 297607 - DNA, 20 bp, synthetic construct
  source 1..20: mol_type = other DNA
gatgaaatttgctcttactc

SEQ ID NO: 297608 - DNA, 20 bp, synthetic construct
  source 1..20: mol_type = other DNA
agatgaaatttgctcttact

SEQ ID NO: 297609 - DNA, 20 bp, synthetic construct
  source 1..20: mol_type = other DNA
aagatgaaatttgctcttac

SEQ ID NO: 297610 - DNA, 20 bp, synthetic construct
  source 1..20: mol_type = other DNA
aaagatgaaatttgctctta

SEQ ID NO: 297611 - DNA, 20 bp, synthetic construct
  source 1..20: mol_type = other DNA
gaaagatgaaatttgctctt

SEQ ID NO: 297612 - DNA, 20 bp, synthetic construct
  source 1..20: mol_type = other DNA
ggaaagatgaaatttgctct

SEQ ID NO: 297613 - DNA, 20 bp, synthetic construct
  source 1..20: mol_type = other DNA
tggaaagatgaaatttgctc

SEQ ID NO: 297614 - DNA, 20 bp, synthetic construct
  source 1..20: mol_type = other DNA
ttggaaagatgaaatttgct

SEQ ID NO: 297615 - DNA, 20 bp, synthetic construct
  source 1..20: mol_type = other DNA
tttggaaagatgaaatttgc

SEQ ID NO: 297616 - DNA, 20 bp, synthetic construct
  source 1..20: mol_type = other DNA
atttggaaagatgaaatttg

SEQ ID NO: 297617 - DNA, 20 bp, synthetic construct
  source 1..20: mol_type = other DNA
aatttggaaagatgaaattt

SEQ ID NO: 297618 - DNA, 20 bp, synthetic construct
  source 1..20: mol_type = other DNA
caatttggaaagatgaaatt

SEQ ID NO: 297619 - DNA, 20 bp, synthetic construct
  source 1..20: mol_type = other DNA
tcaatttggaaagatgaaat

SEQ ID NO: 297620 - DNA, 20 bp, synthetic construct
  source 1..20: mol_type = other DNA
atcaatttggaaagatgaaa

SEQ ID NO: 297621 - DNA, 20 bp, synthetic construct
  source 1..20: mol_type = other DNA
catcaatttggaaagatgaa

SEQ ID NO: 297622 - DNA, 20 bp, synthetic construct
  source 1..20: mol_type = other DNA
ccatcaatttggaaagatga

SEQ ID NO: 297623 - DNA, 20 bp, synthetic construct
  source 1..20: mol_type = other DNA
cccatcaatttggaaagatg

SEQ ID NO: 297624 - DNA, 20 bp, synthetic construct
  source 1..20: mol_type = other DNA
acccatcaatttggaaagat

SEQ ID NO: 297625 - DNA, 20 bp, synthetic construct
  source 1..20: mol_type = other DNA
cacccatcaatttggaaaga

SEQ ID NO: 297626 - DNA, 20 bp, synthetic construct
  source 1..20: mol_type = other DNA
ccacccatcaatttggaaag

SEQ ID NO: 297627 - DNA, 20 bp, synthetic construct
  source 1..20: mol_type = other DNA
cccacccatcaatttggaaa

SEQ ID NO: 297628 - DNA, 20 bp, synthetic construct
  source 1..20: mol_type = other DNA
gcccacccatcaatttggaa

SEQ ID NO: 297629 - DNA, 20 bp, synthetic construct
  source 1..20: mol_type = other DNA
agcccacccatcaatttgga

SEQ ID NO: 297630 - DNA, 20 bp, synthetic construct
  source 1..20: mol_type = other DNA
tagcccacccatcaatttgg

SEQ ID NO: 297631 - DNA, 20 bp, synthetic construct
  source 1..20: mol_type = other DNA
ctagcccacccatcaatttg

SEQ ID NO: 297632 - DNA, 20 bp, synthetic construct
  source 1..20: mol_type = other DNA
actagcccacccatcaattt

SEQ ID NO: 297633 - DNA, 20 bp, synthetic construct
  source 1..20: mol_type = other DNA
tactagcccacccatcaatt

SEQ ID NO: 297634 - DNA, 20 bp, synthetic construct
  source 1..20: mol_type = other DNA
ttactagcccacccatcaat

SEQ ID NO: 297635 - DNA, 20 bp, synthetic construct
  source 1..20: mol_type = other DNA
attactagcccacccatcaa

SEQ ID NO: 297636 - DNA, 20 bp, synthetic construct
  source 1..20: mol_type = other DNA
tattactagcccacccatca

SEQ ID NO: 297637 - DNA, 20 bp, synthetic construct
  source 1..20: mol_type = other DNA
ttattactagcccacccatc

SEQ ID NO: 297638 - DNA, 20 bp, synthetic construct
  source 1..20: mol_type = other DNA
tttattactagcccacccat

SEQ ID NO: 297639 - DNA, 20 bp, synthetic construct
  source 1..20: mol_type = other DNA
ttttattactagcccaccca

SEQ ID NO: 297640 - DNA, 20 bp, synthetic construct
  source 1..20: mol_type = other DNA
attttattactagcccaccc

SEQ ID NO: 297641 - DNA, 20 bp, synthetic construct
  source 1..20: mol_type = other DNA
tattttattactagcccacc

SEQ ID NO: 297642 - DNA, 20 bp, synthetic construct
  source 1..20: mol_type = other DNA
atattttattactagcccac

SEQ ID NO: 297643 - DNA, 20 bp, synthetic construct
  source 1..20: mol_type = other DNA
aatattttattactagccca

SEQ ID NO: 297644 - DNA, 20 bp, synthetic construct
  source 1..20: mol_type = other DNA
aaatattttattactagccc

SEQ ID NO: 297645 - DNA, 20 bp, synthetic construct
  source 1..20: mol_type = other DNA
taaatattttattactagcc

SEQ ID NO: 297646 - DNA, 20 bp, synthetic construct
  source 1..20: mol_type = other DNA
ttaaatattttattactagc

SEQ ID NO: 297647 - DNA, 20 bp, synthetic construct
  source 1..20: mol_type = other DNA
tttaaatattttattactag

SEQ ID NO: 297648 - DNA, 20 bp, synthetic construct
  source 1..20: mol_type = other DNA
ttttaaatattttattacta

SEQ ID NO: 297649 - DNA, 20 bp, synthetic construct
  source 1..20: mol_type = other DNA
tttttaaatattttattact

SEQ ID NO: 297650 - DNA, 20 bp, synthetic construct
  source 1..20: mol_type = other DNA
ttttttaaatattttattac

SEQ ID NO: 297651 - DNA, 20 bp, synthetic construct
  source 1..20: mol_type = other DNA
tttttttaaatattttatta

SEQ ID NO: 297652 - DNA, 20 bp, synthetic construct
  source 1..20: mol_type = other DNA
ttttttttaaatattttatt

SEQ ID NO: 297653 - DNA, 20 bp, synthetic construct
  source 1..20: mol_type = other DNA
tttttttttaaatattttat

SEQ ID NO: 297654 - DNA, 20 bp, synthetic construct
  source 1..20: mol_type = other DNA
gtttttttttaaatatttta

SEQ ID NO: 297655 - DNA, 20 bp, synthetic construct
  source 1..20: mol_type = other DNA
tgtttttttttaaatatttt

SEQ ID NO: 297656 - DNA, 20 bp, synthetic construct
  source 1..20: mol_type = other DNA
atgtttttttttaaatattt

SEQ ID NO: 297657 - DNA, 20 bp, synthetic construct
  source 1..20: mol_type = other DNA
aatgtttttttttaaatatt

SEQ ID NO: 297658 - DNA, 20 bp, synthetic construct
  source 1..20: mol_type = other DNA
gaatgtttttttttaaatat

SEQ ID NO: 297659 - DNA, 20 bp, synthetic construct
  source 1..20: mol_type = other DNA
tgaatgtttttttttaaata

SEQ ID NO: 297660 - DNA, 20 bp, synthetic construct
  source 1..20: mol_type = other DNA
ttgaatgtttttttttaaat

SEQ ID NO: 297661 - DNA, 20 bp, synthetic construct
  source 1..20: mol_type = other DNA
tttgaatgtttttttttaaa

SEQ ID NO: 297662 - DNA, 20 bp, synthetic construct
  source 1..20: mol_type = other DNA
ttttgaatgtttttttttaa

SEQ ID NO: 297663 - DNA, 20 bp, synthetic construct
  source 1..20: mol_type = other DNA
tttttgaatgttttttttta

SEQ ID NO: 297664 - DNA, 20 bp, synthetic construct
  source 1..20: mol_type = other DNA
gtttttgaatgttttttttt

SEQ ID NO: 297665 - DNA, 20 bp, synthetic construct
  source 1..20: mol_type = other DNA
tgtttttgaatgtttttttt

SEQ ID NO: 297666 - DNA, 20 bp, synthetic construct
  source 1..20: mol_type = other DNA
atgtttttgaatgttttttt

SEQ ID NO: 297667 - DNA, 20 bp, synthetic construct
  source 1..20: mol_type = other DNA
catgtttttgaatgtttttt

SEQ ID NO: 297668 - DNA, 20 bp, synthetic construct
  source 1..20: mol_type = other DNA
ccatgtttttgaatgttttt

SEQ ID NO: 297669 - DNA, 20 bp, synthetic construct
  source 1..20: mol_type = other DNA
gccatgtttttgaatgtttt

SEQ ID NO: 297670 - DNA, 20 bp, synthetic construct
  source 1..20: mol_type = other DNA
ggccatgtttttgaatgttt

SEQ ID NO: 297671 - DNA, 20 bp, synthetic construct
  source 1..20: mol_type = other DNA
tggccatgtttttgaatgtt

SEQ ID NO: 297672 - DNA, 20 bp, synthetic construct
  source 1..20: mol_type = other DNA
gtggccatgtttttgaatgt

SEQ ID NO: 297673 - DNA, 20 bp, synthetic construct
  source 1..20: mol_type = other DNA
tgtggccatgtttttgaatg

SEQ ID NO: 297674 - DNA, 20 bp, synthetic construct
  source 1..20: mol_type = other DNA
atgtggccatgtttttgaat

SEQ ID NO: 297675 - DNA, 20 bp, synthetic construct
  source 1..20: mol_type = other DNA
gatgtggccatgtttttgaa

SEQ ID NO: 297676 - DNA, 20 bp, synthetic construct
  source 1..20: mol_type = other DNA
ggatgtggccatgtttttga

SEQ ID NO: 297677 - DNA, 20 bp, synthetic construct
  source 1..20: mol_type = other DNA
tggatgtggccatgtttttg

SEQ ID NO: 297678 - DNA, 20 bp, synthetic construct
  source 1..20: mol_type = other DNA
ttggatgtggccatgttttt

SEQ ID NO: 297679 - DNA, 20 bp, synthetic construct
  source 1..20: mol_type = other DNA
gttggatgtggccatgtttt

SEQ ID NO: 297680 - DNA, 20 bp, synthetic construct
  source 1..20: mol_type = other DNA
tgttggatgtggccatgttt

SEQ ID NO: 297681 - DNA, 20 bp, synthetic construct
  source 1..20: mol_type = other DNA
atgttggatgtggccatgtt

SEQ ID NO: 297682 - DNA, 20 bp, synthetic construct
  source 1..20: mol_type = other DNA
aatgttggatgtggccatgt

SEQ ID NO: 297683 - DNA, 20 bp, synthetic construct
  source 1..20: mol_type = other DNA
aaatgttggatgtggccatg

SEQ ID NO: 297684 - DNA, 20 bp, synthetic construct
  source 1..20: mol_type = other DNA
gaaatgttggatgtggccat

SEQ ID NO: 297685 - DNA, 20 bp, synthetic construct
  source 1..20: mol_type = other DNA
ggaaatgttggatgtggcca

SEQ ID NO: 297686 - DNA, 20 bp, synthetic construct
  source 1..20: mol_type = other DNA
aggaaatgttggatgtggcc

SEQ ID NO: 297687 - DNA, 20 bp, synthetic construct
  source 1..20: mol_type = other DNA
gaggaaatgttggatgtggc

SEQ ID NO: 297688 - DNA, 20 bp, synthetic construct
  source 1..20: mol_type = other DNA
tgaggaaatgttggatgtgg

SEQ ID NO: 297689 - DNA, 20 bp, synthetic construct
  source 1..20: mol_type = other DNA
ctgaggaaatgttggatgtg

SEQ ID NO: 297690 - DNA, 20 bp, synthetic construct
  source 1..20: mol_type = other DNA
cctgaggaaatgttggatgt

SEQ ID NO: 297691 - DNA, 20 bp, synthetic construct
  source 1..20: mol_type = other DNA
gcctgaggaaatgttggatg

SEQ ID NO: 297692 - DNA, 20 bp, synthetic construct
  source 1..20: mol_type = other DNA
tgcctgaggaaatgttggat

SEQ ID NO: 297693 - DNA, 20 bp, synthetic construct
  source 1..20: mol_type = other DNA
ttgcctgaggaaatgttgga

SEQ ID NO: 297694 - DNA, 20 bp, synthetic construct
  source 1..20: mol_type = other DNA
attgcctgaggaaatgttgg

SEQ ID NO: 297695 - DNA, 20 bp, synthetic construct
  source 1..20: mol_type = other DNA
aattgcctgaggaaatgttg

SEQ ID NO: 297696 - DNA, 20 bp, synthetic construct
  source 1..20: mol_type = other DNA
gaattgcctgaggaaatgtt

SEQ ID NO: 297697 - DNA, 20 bp, synthetic construct
  source 1..20: mol_type = other DNA
ggaattgcctgaggaaatgt

SEQ ID NO: 297698 - DNA, 20 bp, synthetic construct
  source 1..20: mol_type = other DNA
aggaattgcctgaggaaatg

SEQ ID NO: 297699 - DNA, 20 bp, synthetic construct
  source 1..20: mol_type = other DNA
aaggaattgcctgaggaaat

SEQ ID NO: 297700 - DNA, 20 bp, synthetic construct
  source 1..20: mol_type = other DNA
aaaggaattgcctgaggaaa

SEQ ID NO: 297701 - DNA, 20 bp, synthetic construct
  source 1..20: mol_type = other DNA
aaaaggaattgcctgaggaa

SEQ ID NO: 297702 - DNA, 20 bp, synthetic construct
  source 1..20: mol_type = other DNA
caaaaggaattgcctgagga

SEQ ID NO: 297703 - DNA, 20 bp, synthetic construct
  source 1..20: mol_type = other DNA
tcaaaaggaattgcctgagg

SEQ ID NO: 297704 - DNA, 20 bp, synthetic construct
  source 1..20: mol_type = other DNA
atcaaaaggaattgcctgag

SEQ ID NO: 297705 - DNA, 20 bp, synthetic construct
  source 1..20: mol_type = other DNA
aatcaaaaggaattgcctga

SEQ ID NO: 297706 - DNA, 20 bp, synthetic construct
  source 1..20: mol_type = other DNA
gaatcaaaaggaattgcctg

SEQ ID NO: 297707 - DNA, 20 bp, synthetic construct
  source 1..20: mol_type = other DNA
agaatcaaaaggaattgcct

SEQ ID NO: 297708 - DNA, 20 bp, synthetic construct
  source 1..20: mol_type = other DNA
aagaatcaaaaggaattgcc

SEQ ID NO: 297709 - DNA, 20 bp, synthetic construct
  source 1..20: mol_type = other DNA
aaagaatcaaaaggaattgc

SEQ ID NO: 297710 - DNA, 20 bp, synthetic construct
  source 1..20: mol_type = other DNA
aaaagaatcaaaaggaattg

SEQ ID NO: 297711 - DNA, 20 bp, synthetic construct
  source 1..20: mol_type = other DNA
aaaaagaatcaaaaggaatt

SEQ ID NO: 297712 - DNA, 20 bp, synthetic construct
  source 1..20: mol_type = other DNA
aaaaaagaatcaaaaggaat

SEQ ID NO: 297713 - DNA, 20 bp, synthetic construct
  source 1..20: mol_type = other DNA
gaaaaaagaatcaaaaggaa

SEQ ID NO: 297714 - DNA, 20 bp, synthetic construct
  source 1..20: mol_type = other DNA
agaaaaaagaatcaaaagga

SEQ ID NO: 297715 - DNA, 20 bp, synthetic construct
  source 1..20: mol_type = other DNA
aagaaaaaagaatcaaaagg

SEQ ID NO: 297716 - DNA, 20 bp, synthetic construct
  source 1..20: mol_type = other DNA
gaagaaaaaagaatcaaaag

SEQ ID NO: 297717 - DNA, 20 bp, synthetic construct
  source 1..20: mol_type = other DNA
ggaagaaaaaagaatcaaaa

SEQ ID NO: 297718 - DNA, 20 bp, synthetic construct
  source 1..20: mol_type = other DNA
gggaagaaaaaagaatcaaa

SEQ ID NO: 297719 - DNA, 20 bp, synthetic construct
  source 1..20: mol_type = other DNA
ggggaagaaaaaagaatcaa

SEQ ID NO: 297720 - DNA, 20 bp, synthetic construct
  source 1..20: mol_type = other DNA
gggggaagaaaaaagaatca

SEQ ID NO: 297721 - DNA, 20 bp, synthetic construct
  source 1..20: mol_type = other DNA
agggggaagaaaaaagaatc

SEQ ID NO: 297722 - DNA, 20 bp, synthetic construct
  source 1..20: mol_type = other DNA
gagggggaagaaaaaagaat

SEQ ID NO: 297723 - DNA, 20 bp, synthetic construct
  source 1..20: mol_type = other DNA
ggagggggaagaaaaaagaa

SEQ ID NO: 297724 - DNA, 20 bp, synthetic construct
  source 1..20: mol_type = other DNA
tggagggggaagaaaaaaga

SEQ ID NO: 297725 - DNA, 20 bp, synthetic construct
  source 1..20: mol_type = other DNA
atggagggggaagaaaaaag

SEQ ID NO: 297726 - DNA, 20 bp, synthetic construct
  source 1..20: mol_type = other DNA
catggagggggaagaaaaaa

SEQ ID NO: 297727 - DNA, 20 bp, synthetic construct
  source 1..20: mol_type = other DNA
acatggagggggaagaaaaa

SEQ ID NO: 297728 - DNA, 20 bp, synthetic construct
  source 1..20: mol_type = other DNA
tacatggagggggaagaaaa

SEQ ID NO: 297729 - DNA, 20 bp, synthetic construct
  source 1..20: mol_type = other DNA
ctacatggagggggaagaaa

SEQ ID NO: 297730 - DNA, 20 bp, synthetic construct
  source 1..20: mol_type = other DNA
tctacatggagggggaagaa

SEQ ID NO: 297731 - DNA, 20 bp, synthetic construct
  source 1..20: mol_type = other DNA
ttctacatggagggggaaga

SEQ ID NO: 297732 - DNA, 20 bp, synthetic construct
  source 1..20: mol_type = other DNA
cttctacatggagggggaag

SEQ ID NO: 297733 - DNA, 20 bp, synthetic construct
  source 1..20: mol_type = other DNA
tcttctacatggagggggaa

SEQ ID NO: 297734 - DNA, 20 bp, synthetic construct
  source 1..20: mol_type = other DNA
ctcttctacatggaggggga

SEQ ID NO: 297735 - DNA, 20 bp, synthetic construct
  source 1..20: mol_type = other DNA
cctcttctacatggaggggg

SEQ ID NO: 297736 - DNA, 20 bp, synthetic construct
  source 1..20: mol_type = other DNA
ccctcttctacatggagggg

SEQ ID NO: 297737 - DNA, 20 bp, synthetic construct
  source 1..20: mol_type = other DNA
tccctcttctacatggaggg

SEQ ID NO: 297738 - DNA, 20 bp, synthetic construct
  source 1..20: mol_type = other DNA
ctccctcttctacatggagg

SEQ ID NO: 297739 - DNA, 20 bp, synthetic construct
  source 1..20: mol_type = other DNA
tctccctcttctacatggag

SEQ ID NO: 297740 - DNA, 20 bp, synthetic construct
  source 1..20: mol_type = other DNA
ttctccctcttctacatgga

SEQ ID NO: 297741 - DNA, 20 bp, synthetic construct
  source 1..20: mol_type = other DNA
cttctccctcttctacatgg

SEQ ID NO: 297742 - DNA, 20 bp, synthetic construct
  source 1..20: mol_type = other DNA
ccttctccctcttctacatg

SEQ ID NO: 297743 - DNA, 20 bp, synthetic construct
  source 1..20: mol_type = other DNA
tccttctccctcttctacat

SEQ ID NO: 297744 - DNA, 20 bp, synthetic construct
  source 1..20: mol_type = other DNA
ctccttctccctcttctaca

SEQ ID NO: 297745 - DNA, 20 bp, synthetic construct
  source 1..20: mol_type = other DNA
tctccttctccctcttctac

SEQ ID NO: 297746 - DNA, 20 bp, synthetic construct
  source 1..20: mol_type = other DNA
ctctccttctccctcttcta

SEQ ID NO: 297747 - DNA, 20 bp, synthetic construct
  source 1..20: mol_type = other DNA
cctctccttctccctcttct

SEQ ID NO: 297748 - DNA, 20 bp, synthetic construct
  source 1..20: mol_type = other DNA
gcctctccttctccctcttc

SEQ ID NO: 297749 - DNA, 20 bp, synthetic construct
  source 1..20: mol_type = other DNA
agcctctccttctccctctt

SEQ ID NO: 297750 - DNA, 20 bp, synthetic construct
  source 1..20: mol_type = other DNA
gagcctctccttctccctct

SEQ ID NO: 297751 - DNA, 20 bp, synthetic construct
  source 1..20: mol_type = other DNA
agagcctctccttctccctc

SEQ ID NO: 297752 - DNA, 20 bp, synthetic construct
  source 1..20: mol_type = other DNA
cagagcctctccttctccct

SEQ ID NO: 297753 - DNA, 20 bp, synthetic construct
  source 1..20: mol_type = other DNA
tcagagcctctccttctccc

SEQ ID NO: 297754 - DNA, 20 bp, synthetic construct
  source 1..20: mol_type = other DNA
ttcagagcctctccttctcc

SEQ ID NO: 297755 - DNA, 20 bp, synthetic construct
  source 1..20: mol_type = other DNA
tttcagagcctctccttctc

SEQ ID NO: 297756 - DNA, 20 bp, synthetic construct
  source 1..20: mol_type = other DNA
ctttcagagcctctccttct

SEQ ID NO: 297757 - DNA, 20 bp, synthetic construct
  source 1..20: mol_type = other DNA
gctttcagagcctctccttc

SEQ ID NO: 297758 - DNA, 20 bp, synthetic construct
  source 1..20: mol_type = other DNA
agctttcagagcctctcctt

SEQ ID NO: 297759 - DNA, 20 bp, synthetic construct
  source 1..20: mol_type = other DNA
cagctttcagagcctctcct

SEQ ID NO: 297760 - DNA, 20 bp, synthetic construct
  source 1..20: mol_type = other DNA
gcagctttcagagcctctcc

SEQ ID NO: 297761 - DNA, 20 bp, synthetic construct
  source 1..20: mol_type = other DNA
agcagctttcagagcctctc

SEQ ID NO: 297762 - DNA, 20 bp, synthetic construct
  source 1..20: mol_type = other DNA
aagcagctttcagagcctct

SEQ ID NO: 297763 - DNA, 20 bp, synthetic construct
  source 1..20: mol_type = other DNA
gaagcagctttcagagcctc

SEQ ID NO: 297764 - DNA, 20 bp, synthetic construct
  source 1..20: mol_type = other DNA
agaagcagctttcagagcct

SEQ ID NO: 297765 - DNA, 20 bp, synthetic construct
  source 1..20: mol_type = other DNA
cagaagcagctttcagagcc

SEQ ID NO: 297766 - DNA, 20 bp, synthetic construct
  source 1..20: mol_type = other DNA
ccagaagcagctttcagagc

SEQ ID NO: 297767 - DNA, 20 bp, synthetic construct
  source 1..20: mol_type = other DNA
cccagaagcagctttcagag

SEQ ID NO: 297768 - DNA, 20 bp, synthetic construct
  source 1..20: mol_type = other DNA
ccccagaagcagctttcaga

SEQ ID NO: 297769 - DNA, 20 bp, synthetic construct
  source 1..20: mol_type = other DNA
cccccagaagcagctttcag

SEQ ID NO: 297770 - DNA, 20 bp, synthetic construct
  source 1..20: mol_type = other DNA
tcccccagaagcagctttca

SEQ ID NO: 297771 - DNA, 20 bp, synthetic construct
  source 1..20: mol_type = other DNA
atcccccagaagcagctttc

SEQ ID NO: 297772 - DNA, 20 bp, synthetic construct
  source 1..20: mol_type = other DNA
aatcccccagaagcagcttt

SEQ ID NO: 297773 - DNA, 20 bp, synthetic construct
  source 1..20: mol_type = other DNA
aaatcccccagaagcagctt

SEQ ID NO: 297774 - DNA, 20 bp, synthetic construct
  source 1..20: mol_type = other DNA
gaaatcccccagaagcagct

SEQ ID NO: 297775 - DNA, 20 bp, synthetic construct
  source 1..20: mol_type = other DNA
tgaaatcccccagaagcagc

SEQ ID NO: 297776 - DNA, 20 bp, synthetic construct
  source 1..20: mol_type = other DNA
ttgaaatcccccagaagcag

SEQ ID NO: 297777 - DNA, 20 bp, synthetic construct
  source 1..20: mol_type = other DNA
cttgaaatcccccagaagca

SEQ ID NO: 297778 - DNA, 20 bp, synthetic construct
  source 1..20: mol_type = other DNA
ccttgaaatcccccagaagc

SEQ ID NO: 297779 - DNA, 20 bp, synthetic construct
  source 1..20: mol_type = other DNA
cccttgaaatcccccagaag

SEQ ID NO: 297780 - DNA, 20 bp, synthetic construct
  source 1..20: mol_type = other DNA
tcccttgaaatcccccagaa

SEQ ID NO: 297781 - DNA, 20 bp, synthetic construct
  source 1..20: mol_type = other DNA
gtcccttgaaatcccccaga

SEQ ID NO: 297782 - DNA, 20 bp, synthetic construct
  source 1..20: mol_type = other DNA
agtcccttgaaatcccccag

SEQ ID NO: 297783 - DNA, 20 bp, synthetic construct
  source 1..20: mol_type = other DNA
cagtcccttgaaatccccca

SEQ ID NO: 297784 - DNA, 20 bp, synthetic construct
  source 1..20: mol_type = other DNA
ccagtcccttgaaatccccc

SEQ ID NO: 297785 - DNA, 20 bp, synthetic construct
  source 1..20: mol_type = other DNA
cccagtcccttgaaatcccc

SEQ ID NO: 297786 - DNA, 20 bp, synthetic construct
  source 1..20: mol_type = other DNA
ccccagtcccttgaaatccc

SEQ ID NO: 297787 - DNA, 20 bp, synthetic construct
  source 1..20: mol_type = other DNA
cccccagtcccttgaaatcc

SEQ ID NO: 297788 - DNA, 20 bp, synthetic construct
  source 1..20: mol_type = other DNA
acccccagtcccttgaaatc

SEQ ID NO: 297789 - DNA, 20 bp, synthetic construct
  source 1..20: mol_type = other DNA
cacccccagtcccttgaaat

SEQ ID NO: 297790 - DNA, 20 bp, synthetic construct
  source 1..20: mol_type = other DNA
gcacccccagtcccttgaaa

SEQ ID NO: 297791 - DNA, 20 bp, synthetic construct
  source 1..20: mol_type = other DNA
ggcacccccagtcccttgaa

SEQ ID NO: 297792 - DNA, 20 bp, synthetic construct
  source 1..20: mol_type = other DNA
tggcacccccagtcccttga

SEQ ID NO: 297793 - DNA, 20 bp, synthetic construct
  source 1..20: mol_type = other DNA
ttggcacccccagtcccttg

SEQ ID NO: 297794 - DNA, 20 bp, synthetic construct
  source 1..20: mol_type = other DNA
gttggcacccccagtccctt

SEQ ID NO: 297795 - DNA, 20 bp, synthetic construct
  source 1..20: mol_type = other DNA
ggttggcacccccagtccct

SEQ ID NO: 297796 - DNA, 20 bp, synthetic construct
  source 1..20: mol_type = other DNA
tggttggcacccccagtccc

SEQ ID NO: 297797 - DNA, 20 bp, synthetic construct
  source 1..20: mol_type = other DNA
gtggttggcacccccagtcc

SEQ ID NO: 297798 - DNA, 20 bp, synthetic construct
  source 1..20: mol_type = other DNA
ggtggttggcacccccagtc

SEQ ID NO: 297799 - DNA, 20 bp, synthetic construct
  source 1..20: mol_type = other DNA
aggtggttggcacccccagt

SEQ ID NO: 297800 - DNA, 20 bp, synthetic construct
  source 1..20: mol_type = other DNA
gaggtggttggcacccccag

SEQ ID NO: 297801 - DNA, 20 bp, synthetic construct
  source 1..20: mol_type = other DNA
agaggtggttggcaccccca

SEQ ID NO: 297802 - DNA, 20 bp, synthetic construct
  source 1..20: mol_type = other DNA
cagaggtggttggcaccccc

SEQ ID NO: 297803 - DNA, 20 bp, synthetic construct
  source 1..20: mol_type = other DNA
ccagaggtggttggcacccc

SEQ ID NO: 297804 - DNA, 20 bp, synthetic construct
  source 1..20: mol_type = other DNA
gccagaggtggttggcaccc

SEQ ID NO: 297805 - DNA, 20 bp, synthetic construct
  source 1..20: mol_type = other DNA
ggccagaggtggttggcacc

SEQ ID NO: 297806 - DNA, 20 bp, synthetic construct
  source 1..20: mol_type = other DNA
gggccagaggtggttggcac

SEQ ID NO: 297807 - DNA, 20 bp, synthetic construct
  source 1..20: mol_type = other DNA
agggccagaggtggttggca

SEQ ID NO: 297808 - DNA, 20 bp, synthetic construct
  source 1..20: mol_type = other DNA
cagggccagaggtggttggc

SEQ ID NO: 297809 - DNA, 20 bp, synthetic construct
  source 1..20: mol_type = other DNA
acagggccagaggtggttgg

SEQ ID NO: 297810 - DNA, 20 bp, synthetic construct
  source 1..20: mol_type = other DNA
aacagggccagaggtggttg

SEQ ID NO: 297811 - DNA, 20 bp, synthetic construct
  source 1..20: mol_type = other DNA
caacagggccagaggtggtt

SEQ ID NO: 297812 - DNA, 20 bp, synthetic construct
  source 1..20: mol_type = other DNA
acaacagggccagaggtggt

SEQ ID NO: 297813 - DNA, 20 bp, synthetic construct
  source 1..20: mol_type = other DNA
cacaacagggccagaggtgg

SEQ ID NO: 297814 - DNA, 20 bp, synthetic construct
  source 1..20: mol_type = other DNA
ccacaacagggccagaggtg

SEQ ID NO: 297815 - DNA, 20 bp, synthetic construct
  source 1..20: mol_type = other DNA
cccacaacagggccagaggt

SEQ ID NO: 297816 - DNA, 20 bp, synthetic construct
  source 1..20: mol_type = other DNA
ccccacaacagggccagagg

SEQ ID NO: 297817 - DNA, 20 bp, synthetic construct
  source 1..20: mol_type = other DNA
cccccacaacagggccagag

SEQ ID NO: 297818 - DNA, 20 bp, synthetic construct
  source 1..20: mol_type = other DNA
acccccacaacagggccaga

SEQ ID NO: 297819 - DNA, 20 bp, synthetic construct
  source 1..20: mol_type = other DNA
cacccccacaacagggccag

SEQ ID NO: 297820 - DNA, 20 bp, synthetic construct
  source 1..20: mol_type = other DNA
acacccccacaacagggcca

SEQ ID NO: 297821 - DNA, 20 bp, synthetic construct
  source 1..20: mol_type = other DNA
gacacccccacaacagggcc

SEQ ID NO: 297822 - DNA, 20 bp, synthetic construct
  source 1..20: mol_type = other DNA
tgacacccccacaacagggc

SEQ ID NO: 297823 - DNA, 20 bp, synthetic construct
  source 1..20: mol_type = other DNA
gtgacacccccacaacaggg

SEQ ID NO: 297824 - DNA, 20 bp, synthetic construct
  source 1..20: mol_type = other DNA
tgtgacacccccacaacagg

SEQ ID NO: 297825 - DNA, 20 bp, synthetic construct
  source 1..20: mol_type = other DNA
ctgtgacacccccacaacag

SEQ ID NO: 297826 - DNA, 20 bp, synthetic construct
  source 1..20: mol_type = other DNA
tctgtgacacccccacaaca

SEQ ID NO: 297827 - DNA, 20 bp, synthetic construct
  source 1..20: mol_type = other DNA
ctctgtgacacccccacaac

SEQ ID NO: 297828 - DNA, 20 bp, synthetic construct
  source 1..20: mol_type = other DNA
cctctgtgacacccccacaa

SEQ ID NO: 297829 - DNA, 20 bp, synthetic construct
  source 1..20: mol_type = other DNA
gcctctgtgacacccccaca

SEQ ID NO: 297830 - DNA, 20 bp, synthetic construct
  source 1..20: mol_type = other DNA
tgcctctgtgacacccccac

SEQ ID NO: 297831 - DNA, 20 bp, synthetic construct
  source 1..20: mol_type = other DNA
ctgcctctgtgacaccccca

SEQ ID NO: 297832 - DNA, 20 bp, synthetic construct
  source 1..20: mol_type = other DNA
actgcctctgtgacaccccc

SEQ ID NO: 297833 - DNA, 20 bp, synthetic construct
  source 1..20: mol_type = other DNA
cactgcctctgtgacacccc

SEQ ID NO: 297834 - DNA, 20 bp, synthetic construct
  source 1..20: mol_type = other DNA
ccactgcctctgtgacaccc

SEQ ID NO: 297835 - DNA, 20 bp, synthetic construct
  source 1..20: mol_type = other DNA
gccactgcctctgtgacacc

SEQ ID NO: 297836 - DNA, 20 bp, synthetic construct
  source 1..20: mol_type = other DNA
tgccactgcctctgtgacac

SEQ ID NO: 297837 - DNA, 20 bp, synthetic construct
  source 1..20: mol_type = other DNA
ctgccactgcctctgtgaca

SEQ ID NO: 297838 - DNA, 20 bp, synthetic construct
  source 1..20: mol_type = other DNA
gctgccactgcctctgtgac

SEQ ID NO: 297839 - DNA, 20 bp, synthetic construct
  source 1..20: mol_type = other DNA
tgctgccactgcctctgtga

SEQ ID NO: 297840 - DNA, 20 bp, synthetic construct
  source 1..20: mol_type = other DNA
ttgctgccactgcctctgtg

SEQ ID NO: 297841 - DNA, 20 bp, synthetic construct
  source 1..20: mol_type = other DNA
gttgctgccactgcctctgt

SEQ ID NO: 297842 - DNA, 20 bp, synthetic construct
  source 1..20: mol_type = other DNA
tgttgctgccactgcctctg

SEQ ID NO: 297843 - DNA, 20 bp, synthetic construct
  source 1..20: mol_type = other DNA
ttgttgctgccactgcctct

SEQ ID NO: 297844 - DNA, 20 bp, synthetic construct
  source 1..20: mol_type = other DNA
tttgttgctgccactgcctc

SEQ ID NO: 297845 - DNA, 20 bp, synthetic construct
  source 1..20: mol_type = other DNA
ctttgttgctgccactgcct

SEQ ID NO: 297846 - DNA, 20 bp, synthetic construct
  source 1..20: mol_type = other DNA
cctttgttgctgccactgcc

SEQ ID NO: 297847 - DNA, 20 bp, synthetic construct
  source 1..20: mol_type = other DNA
tcctttgttgctgccactgc

SEQ ID NO: 297848 - DNA, 20 bp, synthetic construct
  source 1..20: mol_type = other DNA
atcctttgttgctgccactg

SEQ ID NO: 297849 - DNA, 20 bp, synthetic construct
  source 1..20: mol_type = other DNA
aatcctttgttgctgccact

SEQ ID NO: 297850 - DNA, 20 bp, synthetic construct
  source 1..20: mol_type = other DNA
aaatcctttgttgctgccac

SEQ ID NO: 297851 - DNA, 20 bp, synthetic construct
  source 1..20: mol_type = other DNA
caaatcctttgttgctgcca

SEQ ID NO: 297852 - DNA, 20 bp, synthetic construct
  source 1..20: mol_type = other DNA
tcaaatcctttgttgctgcc

SEQ ID NO: 297853 - DNA, 20 bp, synthetic construct
  source 1..20: mol_type = other DNA
ttcaaatcctttgttgctgc

SEQ ID NO: 297854 - DNA, 20 bp, synthetic construct
  source 1..20: mol_type = other DNA
tttcaaatcctttgttgctg

SEQ ID NO: 297855 - DNA, 20 bp, synthetic construct
  source 1..20: mol_type = other DNA
gtttcaaatcctttgttgct

SEQ ID NO: 297856 - DNA, 20 bp, synthetic construct
  source 1..20: mol_type = other DNA
agtttcaaatcctttgttgc

SEQ ID NO: 297857 - DNA, 20 bp, synthetic construct
  source 1..20: mol_type = other DNA
aagtttcaaatcctttgttg

SEQ ID NO: 297858 - DNA, 20 bp, synthetic construct
  source 1..20: mol_type = other DNA
caagtttcaaatcctttgtt

SEQ ID NO: 297859 - DNA, 20 bp, synthetic construct
  source 1..20: mol_type = other DNA
ccaagtttcaaatcctttgt

SEQ ID NO: 297860 - DNA, 20 bp, synthetic construct
  source 1..20: mol_type = other DNA
accaagtttcaaatcctttg

SEQ ID NO: 297861 - DNA, 20 bp, synthetic construct
  source 1..20: mol_type = other DNA
caccaagtttcaaatccttt

SEQ ID NO: 297862 - DNA, 20 bp, synthetic construct
  source 1..20: mol_type = other DNA
acaccaagtttcaaatcctt

SEQ ID NO: 297863 - DNA, 20 bp, synthetic construct
  source 1..20: mol_type = other DNA
cacaccaagtttcaaatcct

SEQ ID NO: 297864 - DNA, 20 bp, synthetic construct
  source 1..20: mol_type = other DNA
acacaccaagtttcaaatcc

SEQ ID NO: 297865 - DNA, 20 bp, synthetic construct
  source 1..20: mol_type = other DNA
aacacaccaagtttcaaatc

SEQ ID NO: 297866 - DNA, 20 bp, synthetic construct
  source 1..20: mol_type = other DNA
gaacacaccaagtttcaaat

SEQ ID NO: 297867 - DNA, 20 bp, synthetic construct
  source 1..20: mol_type = other DNA
cgaacacaccaagtttcaaa

SEQ ID NO: 297868 - DNA, 20 bp, synthetic construct
  source 1..20: mol_type = other DNA
acgaacacaccaagtttcaa

SEQ ID NO: 297869 - DNA, 20 bp, synthetic construct
  source 1..20: mol_type = other DNA
cacgaacacaccaagtttca

SEQ ID NO: 297870 - DNA, 20 bp, synthetic construct
  source 1..20: mol_type = other DNA
ccacgaacacaccaagtttc

SEQ ID NO: 297871 - DNA, 20 bp, synthetic construct
  source 1..20: mol_type = other DNA
tccacgaacacaccaagttt

SEQ ID NO: 297872 - DNA, 20 bp, synthetic construct
  source 1..20: mol_type = other DNA
ctccacgaacacaccaagtt

SEQ ID NO: 297873 - DNA, 20 bp, synthetic construct
  source 1..20: mol_type = other DNA
gctccacgaacacaccaagt

SEQ ID NO: 297874 - DNA, 20 bp, synthetic construct
  source 1..20: mol_type = other DNA
ggctccacgaacacaccaag

SEQ ID NO: 297875 - DNA, 20 bp, synthetic construct
  source 1..20: mol_type = other DNA
tggctccacgaacacaccaa

SEQ ID NO: 297876 - DNA, 20 bp, synthetic construct
  source 1..20: mol_type = other DNA
gtggctccacgaacacacca

SEQ ID NO: 297877 - DNA, 20 bp, synthetic construct
  source 1..20: mol_type = other DNA
tgtggctccacgaacacacc

SEQ ID NO: 297878 - DNA, 20 bp, synthetic construct
  source 1..20: mol_type = other DNA
ctgtggctccacgaacacac

SEQ ID NO: 297879 - DNA, 20 bp, synthetic construct
  source 1..20: mol_type = other DNA
cctgtggctccacgaacaca

SEQ ID NO: 297880 - DNA, 20 bp, synthetic construct
  source 1..20: mol_type = other DNA
gcctgtggctccacgaacac

SEQ ID NO: 297881 - DNA, 20 bp, synthetic construct
  source 1..20: mol_type = other DNA
tgcctgtggctccacgaaca

SEQ ID NO: 297882 - DNA, 20 bp, synthetic construct
  source 1..20: mol_type = other DNA
ctgcctgtggctccacgaac

SEQ ID NO: 297883 - DNA, 20 bp, synthetic construct
  source 1..20: mol_type = other DNA
tctgcctgtggctccacgaa

SEQ ID NO: 297884 - DNA, 20 bp, synthetic construct
  source 1..20: mol_type = other DNA
gtctgcctgtggctccacga

SEQ ID NO: 297885 - DNA, 20 bp, synthetic construct
  source 1..20: mol_type = other DNA
cgtctgcctgtggctccacg

SEQ ID NO: 297886 - DNA, 20 bp, synthetic construct
  source 1..20: mol_type = other DNA
tcgtctgcctgtggctccac

SEQ ID NO: 297887 - DNA, 20 bp, synthetic construct
  source 1..20: mol_type = other DNA
atcgtctgcctgtggctcca

SEQ ID NO: 297888 - DNA, 20 bp, synthetic construct
  source 1..20: mol_type = other DNA
catcgtctgcctgtggctcc

SEQ ID NO: 297889 - DNA, 20 bp, synthetic construct
  source 1..20: mol_type = other DNA
acatcgtctgcctgtggctc

SEQ ID NO: 297890 - DNA, 20 bp, synthetic construct
  source 1..20: mol_type = other DNA
gacatcgtctgcctgtggct

SEQ ID NO: 297891 - DNA, 20 bp, synthetic construct
  source 1..20: mol_type = other DNA
tgacatcgtctgcctgtggc

SEQ ID NO: 297892 - DNA, 20 bp, synthetic construct
  source 1..20: mol_type = other DNA
ttgacatcgtctgcctgtgg

SEQ ID NO: 297893 - DNA, 20 bp, synthetic construct
  source 1..20: mol_type = other DNA
gttgacatcgtctgcctgtg

SEQ ID NO: 297894 - DNA, 20 bp, synthetic construct
  source 1..20: mol_type = other DNA
ggttgacatcgtctgcctgt

SEQ ID NO: 297895 - DNA, 20 bp, synthetic construct
  source 1..20: mol_type = other DNA
aggttgacatcgtctgcctg

SEQ ID NO: 297896 - DNA, 20 bp, synthetic construct
  source 1..20: mol_type = other DNA
aaggttgacatcgtctgcct

SEQ ID NO: 297897 - DNA, 20 bp, synthetic construct
  source 1..20: mol_type = other DNA
caaggttgacatcgtctgcc

SEQ ID NO: 297898 - DNA, 20 bp, synthetic construct
  source 1..20: mol_type = other DNA
acaaggttgacatcgtctgc

SEQ ID NO: 297899 - DNA, 20 bp, synthetic construct
  source 1..20: mol_type = other DNA
cacaaggttgacatcgtctg

SEQ ID NO: 297900 - DNA, 20 bp, synthetic construct
  source 1..20: mol_type = other DNA
acacaaggttgacatcgtct

SEQ ID NO: 297901 - DNA, 20 bp, synthetic construct
  source 1..20: mol_type = other DNA
cacacaaggttgacatcgtc

SEQ ID NO: 297902 - DNA, 20 bp, synthetic construct
  source 1..20: mol_type = other DNA
tcacacaaggttgacatcgt

SEQ ID NO: 297903 - DNA, 20 bp, synthetic construct
  source 1..20: mol_type = other DNA
ctcacacaaggttgacatcg

SEQ ID NO: 297904 - DNA, 20 bp, synthetic construct
  source 1..20: mol_type = other DNA
actcacacaaggttgacatc

SEQ ID NO: 297905 - DNA, 20 bp, synthetic construct
  source 1..20: mol_type = other DNA
cactcacacaaggttgacat

SEQ ID NO: 297906 - DNA, 20 bp, synthetic construct
  source 1..20: mol_type = other DNA
acactcacacaaggttgaca

SEQ ID NO: 297907 - DNA, 20 bp, synthetic construct
  source 1..20: mol_type = other DNA
cacactcacacaaggttgac

SEQ ID NO: 297908 - DNA, 20 bp, synthetic construct
  source 1..20: mol_type = other DNA
tcacactcacacaaggttga

SEQ ID NO: 297909 - DNA, 20 bp, synthetic construct
  source 1..20: mol_type = other DNA
gtcacactcacacaaggttg

SEQ ID NO: 297910 - DNA, 20 bp, synthetic construct
  source 1..20: mol_type = other DNA
cgtcacactcacacaaggtt

SEQ ID NO: 297911 - DNA, 20 bp, synthetic construct
  source 1..20: mol_type = other DNA
ccgtcacactcacacaaggt

SEQ ID NO: 297912 - DNA, 20 bp, synthetic construct
  source 1..20: mol_type = other DNA
cccgtcacactcacacaagg

SEQ ID NO: 297913 - DNA, 20 bp, synthetic construct
  source 1..20: mol_type = other DNA
ccccgtcacactcacacaag

SEQ ID NO: 297914 - DNA, 20 bp, synthetic construct
  source 1..20: mol_type = other DNA
cccccgtcacactcacacaa

SEQ ID NO: 297915 - DNA, 20 bp, synthetic construct
  source 1..20: mol_type = other DNA
acccccgtcacactcacaca

SEQ ID NO: 297916 - DNA, 20 bp, synthetic construct
  source 1..20: mol_type = other DNA
aacccccgtcacactcacac

SEQ ID NO: 297917 - DNA, 20 bp, synthetic construct
  source 1..20: mol_type = other DNA
caacccccgtcacactcaca

SEQ ID NO: 297918 - DNA, 20 bp, synthetic construct
  source 1..20: mol_type = other DNA
ccaacccccgtcacactcac

SEQ ID NO: 297919 - DNA, 20 bp, synthetic construct
  source 1..20: mol_type = other DNA
cccaacccccgtcacactca

SEQ ID NO: 297920 - DNA, 20 bp, synthetic construct
  source 1..20: mol_type = other DNA
ccccaacccccgtcacactc

SEQ ID NO: 297921 - DNA, 20 bp, synthetic construct
  source 1..20: mol_type = other DNA
accccaacccccgtcacact

SEQ ID NO: 297922 - DNA, 20 bp, synthetic construct
  source 1..20: mol_type = other DNA
caccccaacccccgtcacac

SEQ ID NO: 297923 - DNA, 20 bp, synthetic construct
  source 1..20: mol_type = other DNA
ccaccccaacccccgtcaca

SEQ ID NO: 297924 - DNA, 20 bp, synthetic construct
  source 1..20: mol_type = other DNA
cccaccccaacccccgtcac

SEQ ID NO: 297925 - DNA, 20 bp, synthetic construct
  source 1..20: mol_type = other DNA
ccccaccccaacccccgtca

SEQ ID NO: 297926 - DNA, 20 bp, synthetic construct
  source 1..20: mol_type = other DNA
gccccaccccaacccccgtc

SEQ ID NO: 297927 - DNA, 20 bp, synthetic construct
  source 1..20: mol_type = other DNA
cgccccaccccaacccccgt

SEQ ID NO: 297928 - DNA, 20 bp, synthetic construct
  source 1..20: mol_type = other DNA
ccgccccaccccaacccccg

SEQ ID NO: 297929 - DNA, 20 bp, synthetic construct
  source 1..20: mol_type = other DNA
cccgccccaccccaaccccc

SEQ ID NO: 297930 - DNA, 20 bp, synthetic construct
  source 1..20: mol_type = other DNA
tcccgccccaccccaacccc

SEQ ID NO: 297931 - DNA, 20 bp, synthetic construct
  source 1..20: mol_type = other DNA
ctcccgccccaccccaaccc

SEQ ID NO: 297932 - DNA, 20 bp, synthetic construct
  source 1..20: mol_type = other DNA
cctcccgccccaccccaacc

SEQ ID NO: 297933 - DNA, 20 bp, synthetic construct
  source 1..20: mol_type = other DNA
gcctcccgccccaccccaac

SEQ ID NO: 297934 - DNA, 20 bp, synthetic construct
  source 1..20: mol_type = other DNA
ggcctcccgccccaccccaa

SEQ ID NO: 297935 - DNA, 20 bp, synthetic construct
  source 1..20: mol_type = other DNA
tggcctcccgccccacccca

SEQ ID NO: 297936 - DNA, 20 bp, synthetic construct
  source 1..20: mol_type = other DNA
gtggcctcccgccccacccc

SEQ ID NO: 297937 - DNA, 20 bp, synthetic construct
  source 1..20: mol_type = other DNA
cgtggcctcccgccccaccc

SEQ ID NO: 297938 - DNA, 20 bp, synthetic construct
  source 1..20: mol_type = other DNA
ccgtggcctcccgccccacc

SEQ ID NO: 297939 - DNA, 20 bp, synthetic construct
  source 1..20: mol_type = other DNA
cccgtggcctcccgccccac

SEQ ID NO: 297940 - DNA, 20 bp, synthetic construct
  source 1..20: mol_type = other DNA
ccccgtggcctcccgcccca

SEQ ID NO: 297941 - DNA, 20 bp, synthetic construct
  source 1..20: mol_type = other DNA
cccccgtggcctcccgcccc

SEQ ID NO: 297942 - DNA, 20 bp, synthetic construct
  source 1..20: mol_type = other DNA
tcccccgtggcctcccgccc

SEQ ID NO: 297943 - DNA, 20 bp, synthetic construct
  source 1..20: mol_type = other DNA
ctcccccgtggcctcccgcc

SEQ ID NO: 297944 - DNA, 20 bp, synthetic construct
  source 1..20: mol_type = other DNA
cctcccccgtggcctcccgc

SEQ ID NO: 297945 - DNA, 20 bp, synthetic construct
  source 1..20: mol_type = other DNA
gcctcccccgtggcctcccg

SEQ ID NO: 297946 - DNA, 20 bp, synthetic construct
  source 1..20: mol_type = other DNA
ggcctcccccgtggcctccc

SEQ ID NO: 297947 - DNA, 20 bp, synthetic construct
  source 1..20: mol_type = other DNA
cggcctcccccgtggcctcc

SEQ ID NO: 297948 - DNA, 20 bp, synthetic construct
  source 1..20: mol_type = other DNA
tcggcctcccccgtggcctc

SEQ ID NO: 297949 - DNA, 20 bp, synthetic construct
  source 1..20: mol_type = other DNA
ctcggcctcccccgtggcct

SEQ ID NO: 297950 - DNA, 20 bp, synthetic construct
  source 1..20: mol_type = other DNA
cctcggcctcccccgtggcc

SEQ ID NO: 297951 - DNA, 20 bp, synthetic construct
  source 1..20: mol_type = other DNA
gcctcggcctcccccgtggc

SEQ ID NO: 297952 - DNA, 20 bp, synthetic construct
  source 1..20: mol_type = other DNA
tgcctcggcctcccccgtgg

SEQ ID NO: 297953 - DNA, 20 bp, synthetic construct
  source 1..20: mol_type = other DNA
ctgcctcggcctcccccgtg

SEQ ID NO: 297954 - DNA, 20 bp, synthetic construct
  source 1..20: mol_type = other DNA
cctgcctcggcctcccccgt

SEQ ID NO: 297955 - DNA, 20 bp, synthetic construct
  source 1..20: mol_type = other DNA
ccctgcctcggcctcccccg

SEQ ID NO: 297956 - DNA, 20 bp, synthetic construct
  source 1..20: mol_type = other DNA
cccctgcctcggcctccccc

SEQ ID NO: 297957 - DNA, 20 bp, synthetic construct
  source 1..20: mol_type = other DNA
gcccctgcctcggcctcccc

SEQ ID NO: 297958 - DNA, 20 bp, synthetic construct
  source 1..20: mol_type = other DNA
agcccctgcctcggcctccc

SEQ ID NO: 297959 - DNA, 20 bp, synthetic construct
  source 1..20: mol_type = other DNA
cagcccctgcctcggcctcc

SEQ ID NO: 297960 - DNA, 20 bp, synthetic construct
  source 1..20: mol_type = other DNA
ccagcccctgcctcggcctc

SEQ ID NO: 297961 - DNA, 20 bp, synthetic construct
  source 1..20: mol_type = other DNA
cccagcccctgcctcggcct

SEQ ID NO: 297962 - DNA, 20 bp, synthetic construct
  source 1..20: mol_type = other DNA
gcccagcccctgcctcggcc

SEQ ID NO: 297963 - DNA, 20 bp, synthetic construct
  source 1..20: mol_type = other DNA
tgcccagcccctgcctcggc

SEQ ID NO: 297964 - DNA, 20 bp, synthetic construct
  source 1..20: mol_type = other DNA
ctgcccagcccctgcctcgg

SEQ ID NO: 297965 - DNA, 20 bp, synthetic construct
  source 1..20: mol_type = other DNA
tctgcccagcccctgcctcg

SEQ ID NO: 297966 - DNA, 20 bp, synthetic construct
  source 1..20: mol_type = other DNA
ctctgcccagcccctgcctc

SEQ ID NO: 297967 - DNA, 20 bp, synthetic construct
  source 1..20: mol_type = other DNA
cctctgcccagcccctgcct

SEQ ID NO: 297968 - DNA, 20 bp, synthetic construct
  source 1..20: mol_type = other DNA
ccctctgcccagcccctgcc

SEQ ID NO: 297969 - DNA, 20 bp, synthetic construct
  source 1..20: mol_type = other DNA
cccctctgcccagcccctgc

SEQ ID NO: 297970 - DNA, 20 bp, synthetic construct
  source 1..20: mol_type = other DNA
tcccctctgcccagcccctg

SEQ ID NO: 297971 - DNA, 20 bp, synthetic construct
  source 1..20: mol_type = other DNA
ctcccctctgcccagcccct

SEQ ID NO: 297972 - DNA, 20 bp, synthetic construct
  source 1..20: mol_type = other DNA
tctcccctctgcccagcccc

SEQ ID NO: 297973 - DNA, 20 bp, synthetic construct
  source 1..20: mol_type = other DNA
ctctcccctctgcccagccc

SEQ ID NO: 297974 - DNA, 20 bp, synthetic construct
  source 1..20: mol_type = other DNA
cctctcccctctgcccagcc

SEQ ID NO: 297975 - DNA, 20 bp, synthetic construct
  source 1..20: mol_type = other DNA
tcctctcccctctgcccagc

SEQ ID NO: 297976 - DNA, 20 bp, synthetic construct
  source 1..20: mol_type = other DNA
ttcctctcccctctgcccag

SEQ ID NO: 297977 - DNA, 20 bp, synthetic construct
  source 1..20: mol_type = other DNA
cttcctctcccctctgccca

SEQ ID NO: 297978 - DNA, 20 bp, synthetic construct
  source 1..20: mol_type = other DNA
gcttcctctcccctctgccc

SEQ ID NO: 297979 - DNA, 20 bp, synthetic construct
  source 1..20: mol_type = other DNA
tgcttcctctcccctctgcc

SEQ ID NO: 297980 - DNA, 20 bp, synthetic construct
  source 1..20: mol_type = other DNA
gtgcttcctctcccctctgc

SEQ ID NO: 297981 - DNA, 20 bp, synthetic construct
  source 1..20: mol_type = other DNA
tgtgcttcctctcccctctg

SEQ ID NO: 297982 - DNA, 20 bp, synthetic construct
  source 1..20: mol_type = other DNA
ttgtgcttcctctcccctct

SEQ ID NO: 297983 - DNA, 20 bp, synthetic construct
  source 1..20: mol_type = other DNA
cttgtgcttcctctcccctc

SEQ ID NO: 297984 - DNA, 20 bp, synthetic construct
  source 1..20: mol_type = other DNA
tcttgtgcttcctctcccct

SEQ ID NO: 297985 - DNA, 20 bp, synthetic construct
  source 1..20: mol_type = other DNA
ttcttgtgcttcctctcccc

SEQ ID NO: 297986 - DNA, 20 bp, synthetic construct
  source 1..20: mol_type = other DNA
cttcttgtgcttcctctccc

SEQ ID NO: 297987 - DNA, 20 bp, synthetic construct
  source 1..20: mol_type = other DNA
acttcttgtgcttcctctcc

SEQ ID NO: 297988 - DNA, 20 bp, synthetic construct
  source 1..20: mol_type = other DNA
cacttcttgtgcttcctctc

SEQ ID NO: 297989 - DNA, 20 bp, synthetic construct
  source 1..20: mol_type = other DNA
ccacttcttgtgcttcctct

SEQ ID NO: 297990 - DNA, 20 bp, synthetic construct
  source 1..20: mol_type = other DNA
cccacttcttgtgcttcctc

SEQ ID NO: 297991 - DNA, 20 bp, synthetic construct
  source 1..20: mol_type = other DNA
tcccacttcttgtgcttcct

SEQ ID NO: 297992 - DNA, 20 bp, synthetic construct
  source 1..20: mol_type = other DNA
ctcccacttcttgtgcttcc

SEQ ID NO: 297993 - DNA, 20 bp, synthetic construct
  source 1..20: mol_type = other DNA
actcccacttcttgtgcttc

SEQ ID NO: 297994 - DNA, 20 bp, synthetic construct
  source 1..20: mol_type = other DNA
cactcccacttcttgtgctt

SEQ ID NO: 297995 - DNA, 20 bp, synthetic construct
  source 1..20: mol_type = other DNA
ccactcccacttcttgtgct

SEQ ID NO: 297996 - DNA, 20 bp, synthetic construct
  source 1..20: mol_type = other DNA
cccactcccacttcttgtgc

SEQ ID NO: 297997 - DNA, 20 bp, synthetic construct
  source 1..20: mol_type = other DNA
tcccactcccacttcttgtg

SEQ ID NO: 297998 - DNA, 20 bp, synthetic construct
  source 1..20: mol_type = other DNA
ctcccactcccacttcttgt

SEQ ID NO: 297999 - DNA, 20 bp, synthetic construct
  source 1..20: mol_type = other DNA
tctcccactcccacttcttg

SEQ ID NO: 298000 - DNA, 20 bp, synthetic construct
  source 1..20: mol_type = other DNA
ctctcccactcccacttctt

SEQ ID NO: 298001 - DNA, 20 bp, synthetic construct
  source 1..20: mol_type = other DNA
cctctcccactcccacttct

SEQ ID NO: 298002 - DNA, 20 bp, synthetic construct
  source 1..20: mol_type = other DNA
tcctctcccactcccacttc

SEQ ID NO: 298003 - DNA, 20 bp, synthetic construct
  source 1..20: mol_type = other DNA
ttcctctcccactcccactt

SEQ ID NO: 298004 - DNA, 20 bp, synthetic construct
  source 1..20: mol_type = other DNA
cttcctctcccactcccact

SEQ ID NO: 298005 - DNA, 20 bp, synthetic construct
  source 1..20: mol_type = other DNA
gcttcctctcccactcccac

SEQ ID NO: 298006 - DNA, 20 bp, synthetic construct
  source 1..20: mol_type = other DNA
ggcttcctctcccactccca

SEQ ID NO: 298007 - DNA, 20 bp, synthetic construct
  source 1..20: mol_type = other DNA
tggcttcctctcccactccc

SEQ ID NO: 298008 - DNA, 20 bp, synthetic construct
  source 1..20: mol_type = other DNA
gtggcttcctctcccactcc

SEQ ID NO: 298009 - DNA, 20 bp, synthetic construct
  source 1..20: mol_type = other DNA
cgtggcttcctctcccactc

SEQ ID NO: 298010 - DNA, 20 bp, synthetic construct
  source 1..20: mol_type = other DNA
acgtggcttcctctcccact

SEQ ID NO: 298011 - DNA, 20 bp, synthetic construct
  source 1..20: mol_type = other DNA
cacgtggcttcctctcccac

SEQ ID NO: 298012 - DNA, 20 bp, synthetic construct
  source 1..20: mol_type = other DNA
gcacgtggcttcctctccca

SEQ ID NO: 298013 - DNA, 20 bp, synthetic construct
  source 1..20: mol_type = other DNA
agcacgtggcttcctctccc

SEQ ID NO: 298014 - DNA, 20 bp, synthetic construct
  source 1..20: mol_type = other DNA
cagcacgtggcttcctctcc

SEQ ID NO: 298015 - DNA, 20 bp, synthetic construct
  source 1..20: mol_type = other DNA
ccagcacgtggcttcctctc

SEQ ID NO: 298016 - DNA, 20 bp, synthetic construct
  source 1..20: mol_type = other DNA
tccagcacgtggcttcctct

SEQ ID NO: 298017 - DNA, 20 bp, synthetic construct
  source 1..20: mol_type = other DNA
ctccagcacgtggcttcctc

SEQ ID NO: 298018 - DNA, 20 bp, synthetic construct
  source 1..20: mol_type = other DNA
tctccagcacgtggcttcct

SEQ ID NO: 298019 - DNA, 20 bp, synthetic construct
  source 1..20: mol_type = other DNA
ctctccagcacgtggcttcc

SEQ ID NO: 298020 - DNA, 20 bp, synthetic construct
  source 1..20: mol_type = other DNA
actctccagcacgtggcttc

SEQ ID NO: 298021 - DNA, 20 bp, synthetic construct
  source 1..20: mol_type = other DNA
tactctccagcacgtggctt

SEQ ID NO: 298022 - DNA, 20 bp, synthetic construct
  source 1..20: mol_type = other DNA
ctactctccagcacgtggct

SEQ ID NO: 298023 - DNA, 20 bp, synthetic construct
  source 1..20: mol_type = other DNA
tctactctccagcacgtggc

SEQ ID NO: 298024 - DNA, 20 bp, synthetic construct
  source 1..20: mol_type = other DNA
gtctactctccagcacgtgg

SEQ ID NO: 298025 - DNA, 20 bp, synthetic construct
  source 1..20: mol_type = other DNA
tgtctactctccagcacgtg

SEQ ID NO: 298026 - DNA, 20 bp, synthetic construct
  source 1..20: mol_type = other DNA
atgtctactctccagcacgt

SEQ ID NO: 298027 - DNA, 20 bp, synthetic construct
  source 1..20: mol_type = other DNA
gatgtctactctccagcacg

SEQ ID NO: 298028 - DNA, 20 bp, synthetic construct
  source 1..20: mol_type = other DNA
ggatgtctactctccagcac

SEQ ID NO: 298029 - DNA, 20 bp, synthetic construct
  source 1..20: mol_type = other DNA
gggatgtctactctccagca

SEQ ID NO: 298030 - DNA, 20 bp, synthetic construct
  source 1..20: mol_type = other DNA
ggggatgtctactctccagc

SEQ ID NO: 298031 - DNA, 20 bp, synthetic construct
  source 1..20: mol_type = other DNA
gggggatgtctactctccag

SEQ ID NO: 298032 - DNA, 20 bp, synthetic construct
  source 1..20: mol_type = other DNA
agggggatgtctactctcca

SEQ ID NO: 298033 - DNA, 20 bp, synthetic construct
  source 1..20: mol_type = other DNA
gagggggatgtctactctcc

SEQ ID NO: 298034 - DNA, 20 bp, synthetic construct
  source 1..20: mol_type = other DNA
ggagggggatgtctactctc

SEQ ID NO: 298035 - DNA, 20 bp, synthetic construct
  source 1..20: mol_type = other DNA
aggagggggatgtctactct

SEQ ID NO: 298036 - DNA, 20 bp, synthetic construct
  source 1..20: mol_type = other DNA
aaggagggggatgtctactc

SEQ ID NO: 298037 - DNA, 20 bp, synthetic construct
  source 1..20: mol_type = other DNA
caaggagggggatgtctact

SEQ ID NO: 298038 - DNA, 20 bp, synthetic construct
  source 1..20: mol_type = other DNA
gcaaggagggggatgtctac

SEQ ID NO: 298039 - DNA, 20 bp, synthetic construct
  source 1..20: mol_type = other DNA
ggcaaggagggggatgtcta

SEQ ID NO: 298040 - DNA, 20 bp, synthetic construct
  source 1..20: mol_type = other DNA
cggcaaggagggggatgtct

SEQ ID NO: 298041 - DNA, 20 bp, synthetic construct
  source 1..20: mol_type = other DNA
gcggcaaggagggggatgtc

SEQ ID NO: 298042 - DNA, 20 bp, synthetic construct
  source 1..20: mol_type = other DNA
agcggcaaggagggggatgt

SEQ ID NO: 298043 - DNA, 20 bp, synthetic construct
  source 1..20: mol_type = other DNA
cagcggcaaggagggggatg

SEQ ID NO: 298044 - DNA, 20 bp, synthetic construct
  source 1..20: mol_type = other DNA
ccagcggcaaggagggggat

SEQ ID NO: 298045 - DNA, 20 bp, synthetic construct
  source 1..20: mol_type = other DNA
cccagcggcaaggaggggga

SEQ ID NO: 298046 - DNA, 20 bp, synthetic construct
  source 1..20: mol_type = other DNA
tcccagcggcaaggaggggg

SEQ ID NO: 298047 - DNA, 20 bp, synthetic construct
  source 1..20: mol_type = other DNA
ctcccagcggcaaggagggg

SEQ ID NO: 298048 - DNA, 20 bp, synthetic construct
  source 1..20: mol_type = other DNA
tctcccagcggcaaggaggg

SEQ ID NO: 298049 - DNA, 20 bp, synthetic construct
  source 1..20: mol_type = other DNA
ctctcccagcggcaaggagg

SEQ ID NO: 298050 - DNA, 20 bp, synthetic construct
  source 1..20: mol_type = other DNA
gctctcccagcggcaaggag

SEQ ID NO: 298051 - DNA, 20 bp, synthetic construct
  source 1..20: mol_type = other DNA
ggctctcccagcggcaagga

SEQ ID NO: 298052 - DNA, 20 bp, synthetic construct
  source 1..20: mol_type = other DNA
tggctctcccagcggcaagg

SEQ ID NO: 298053 - DNA, 20 bp, synthetic construct
  source 1..20: mol_type = other DNA
ttggctctcccagcggcaag

SEQ ID NO: 298054 - DNA, 20 bp, synthetic construct
  source 1..20: mol_type = other DNA
cttggctctcccagcggcaa

SEQ ID NO: 298055 - DNA, 20 bp, synthetic construct
  source 1..20: mol_type = other DNA
ccttggctctcccagcggca

SEQ ID NO: 298056 - DNA, 20 bp, synthetic construct
  source 1..20: mol_type = other DNA
gccttggctctcccagcggc

SEQ ID NO: 298057 - DNA, 20 bp, synthetic construct
  source 1..20: mol_type = other DNA
ggccttggctctcccagcgg

SEQ ID NO: 298058 - DNA, 20 bp, synthetic construct
  source 1..20: mol_type = other DNA
aggccttggctctcccagcg

SEQ ID NO: 298059 - DNA, 20 bp, synthetic construct
  source 1..20: mol_type = other DNA
taggccttggctctcccagc

SEQ ID NO: 298060 - DNA, 20 bp, synthetic construct
  source 1..20: mol_type = other DNA
ataggccttggctctcccag

SEQ ID NO: 298061 - DNA, 20 bp, synthetic construct
  source 1..20: mol_type = other DNA
cataggccttggctctccca

SEQ ID NO: 298062 - DNA, 20 bp, synthetic construct
  source 1..20: mol_type = other DNA
gcataggccttggctctccc

SEQ ID NO: 298063 - DNA, 20 bp, synthetic construct
  source 1..20: mol_type = other DNA
ggcataggccttggctctcc

SEQ ID NO: 298064 - DNA, 20 bp, synthetic construct
  source 1..20: mol_type = other DNA
tggcataggccttggctctc

SEQ ID NO: 298065 - DNA, 20 bp, synthetic construct
  source 1..20: mol_type = other DNA
gtggcataggccttggctct

SEQ ID NO: 298066 - DNA, 20 bp, synthetic construct
  source 1..20: mol_type = other DNA
ggtggcataggccttggctc

SEQ ID NO: 298067 - DNA, 20 bp, synthetic construct
  source 1..20: mol_type = other DNA
aggtggcataggccttggct

SEQ ID NO: 298068 - DNA, 20 bp, synthetic construct
  source 1..20: mol_type = other DNA
caggtggcataggccttggc

SEQ ID NO: 298069 - DNA, 20 bp, synthetic construct
  source 1..20: mol_type = other DNA
gcaggtggcataggccttgg

SEQ ID NO: 298070 - DNA, 20 bp, synthetic construct
  source 1..20: mol_type = other DNA
tgcaggtggcataggccttg

SEQ ID NO: 298071 - DNA, 20 bp, synthetic construct
  source 1..20: mol_type = other DNA
ctgcaggtggcataggcctt

SEQ ID NO: 298072 - DNA, 20 bp, synthetic construct
  source 1..20: mol_type = other DNA
gctgcaggtggcataggcct

SEQ ID NO: 298073 - DNA, 20 bp, synthetic construct
  source 1..20: mol_type = other DNA
cgctgcaggtggcataggcc

SEQ ID NO: 298074 - DNA, 20 bp, synthetic construct
  source 1..20: mol_type = other DNA
acgctgcaggtggcataggc

SEQ ID NO: 298075 - DNA, 20 bp, synthetic construct
  source 1..20: mol_type = other DNA
gacgctgcaggtggcatagg

SEQ ID NO: 298076 - DNA, 20 bp, synthetic construct
  source 1..20: mol_type = other DNA
agacgctgcaggtggcatag

SEQ ID NO: 298077 - DNA, 20 bp, synthetic construct
  source 1..20: mol_type = other DNA
cagacgctgcaggtggcata

SEQ ID NO: 298078 - DNA, 20 bp, synthetic construct
  source 1..20: mol_type = other DNA
tcagacgctgcaggtggcat

SEQ ID NO: 298079 - DNA, 20 bp, synthetic construct
  source 1..20: mol_type = other DNA
ctcagacgctgcaggtggca

SEQ ID NO: 298080 - DNA, 20 bp, synthetic construct
  source 1..20: mol_type = other DNA
gctcagacgctgcaggtggc

SEQ ID NO: 298081 - DNA, 20 bp, synthetic construct
  source 1..20: mol_type = other DNA
cgctcagacgctgcaggtgg

SEQ ID NO: 298082 - DNA, 20 bp, synthetic construct
  source 1..20: mol_type = other DNA
ccgctcagacgctgcaggtg

SEQ ID NO: 298083 - DNA, 20 bp, synthetic construct
  source 1..20: mol_type = other DNA
gccgctcagacgctgcaggt

SEQ ID NO: 298084 - DNA, 20 bp, synthetic construct
  source 1..20: mol_type = other DNA
ggccgctcagacgctgcagg

SEQ ID NO: 298085 - DNA, 20 bp, synthetic construct
  source 1..20: mol_type = other DNA
cggccgctcagacgctgcag

SEQ ID NO: 298086 - DNA, 20 bp, synthetic construct
  source 1..20: mol_type = other DNA
gcggccgctcagacgctgca

SEQ ID NO: 298087 - DNA, 20 bp, synthetic construct
  source 1..20: mol_type = other DNA
ggcggccgctcagacgctgc

SEQ ID NO: 298088 - DNA, 20 bp, synthetic construct
  source 1..20: mol_type = other DNA
aggcggccgctcagacgctg

SEQ ID NO: 298089 - DNA, 20 bp, synthetic construct
  source 1..20: mol_type = other DNA
caggcggccgctcagacgct

SEQ ID NO: 298090 - DNA, 20 bp, synthetic construct
  source 1..20: mol_type = other DNA
acaggcggccgctcagacgc

SEQ ID NO: 298091 - DNA, 20 bp, synthetic construct
  source 1..20: mol_type = other DNA
gacaggcggccgctcagacg

SEQ ID NO: 298092 - DNA, 20 bp, synthetic construct
  source 1..20: mol_type = other DNA
ggacaggcggccgctcagac

SEQ ID NO: 298093 - DNA, 20 bp, synthetic construct
  source 1..20: mol_type = other DNA
aggacaggcggccgctcaga

SEQ ID NO: 298094 - DNA, 20 bp, synthetic construct
  source 1..20: mol_type = other DNA
aaggacaggcggccgctcag

SEQ ID NO: 298095 - DNA, 20 bp, synthetic construct
  source 1..20: mol_type = other DNA
caaggacaggcggccgctca

SEQ ID NO: 298096 - DNA, 20 bp, synthetic construct
  source 1..20: mol_type = other DNA
ccaaggacaggcggccgctc

SEQ ID NO: 298097 - DNA, 20 bp, synthetic construct
  source 1..20: mol_type = other DNA
accaaggacaggcggccgct

SEQ ID NO: 298098 - DNA, 20 bp, synthetic construct
  source 1..20: mol_type = other DNA
caccaaggacaggcggccgc

SEQ ID NO: 298099 - DNA, 20 bp, synthetic construct
  source 1..20: mol_type = other DNA
ccaccaaggacaggcggccg

SEQ ID NO: 298100 - DNA, 20 bp, synthetic construct
  source 1..20: mol_type = other DNA
gccaccaaggacaggcggcc

SEQ ID NO: 298101 - DNA, 20 bp, synthetic construct
  source 1..20: mol_type = other DNA
ggccaccaaggacaggcggc

SEQ ID NO: 298102 - DNA, 20 bp, synthetic construct
  source 1..20: mol_type = other DNA
cggccaccaaggacaggcgg

SEQ ID NO: 298103 - DNA, 20 bp, synthetic construct
  source 1..20: mol_type = other DNA
ccggccaccaaggacaggcg

SEQ ID NO: 298104 - DNA, 20 bp, synthetic construct
  source 1..20: mol_type = other DNA
cccggccaccaaggacaggc

SEQ ID NO: 298105 - DNA, 20 bp, synthetic construct
  source 1..20: mol_type = other DNA
ccccggccaccaaggacagg

SEQ ID NO: 298106 - DNA, 20 bp, synthetic construct
  source 1..20: mol_type = other DNA
cccccggccaccaaggacag

SEQ ID NO: 298107 - DNA, 20 bp, synthetic construct
  source 1..20: mol_type = other DNA
acccccggccaccaaggaca

SEQ ID NO: 298108 - DNA, 20 bp, synthetic construct
  source 1..20: mol_type = other DNA
cacccccggccaccaaggac

SEQ ID NO: 298109 - DNA, 20 bp, synthetic construct
  source 1..20: mol_type = other DNA
ccacccccggccaccaagga

SEQ ID NO: 298110 - DNA, 20 bp, synthetic construct
  source 1..20: mol_type = other DNA
cccacccccggccaccaagg

SEQ ID NO: 298111 - DNA, 20 bp, synthetic construct
  source 1..20: mol_type = other DNA
ccccacccccggccaccaag

SEQ ID NO: 298112 - DNA, 20 bp, synthetic construct
  source 1..20: mol_type = other DNA
cccccacccccggccaccaa

SEQ ID NO: 298113 - DNA, 20 bp, synthetic construct
  source 1..20: mol_type = other DNA
gcccccacccccggccacca

SEQ ID NO: 298114 - DNA, 20 bp, synthetic construct
  source 1..20: mol_type = other DNA
ggcccccacccccggccacc

SEQ ID NO: 298115 - DNA, 20 bp, synthetic construct
  source 1..20: mol_type = other DNA
aggcccccacccccggccac

SEQ ID NO: 298116 - DNA, 20 bp, synthetic construct
  source 1..20: mol_type = other DNA
caggcccccacccccggcca

SEQ ID NO: 298117 - DNA, 20 bp, synthetic construct
  source 1..20: mol_type = other DNA
gcaggcccccacccccggcc

SEQ ID NO: 298118 - DNA, 20 bp, synthetic construct
  source 1..20: mol_type = other DNA
agcaggcccccacccccggc

SEQ ID NO: 298119 - DNA, 20 bp, synthetic construct
  source 1..20: mol_type = other DNA
cagcaggcccccacccccgg

SEQ ID NO: 298120 - DNA, 20 bp, synthetic construct
  source 1..20: mol_type = other DNA
acagcaggcccccacccccg

SEQ ID NO: 298121 - DNA, 20 bp, synthetic construct
  source 1..20: mol_type = other DNA
cacagcaggcccccaccccc

SEQ ID NO: 298122 - DNA, 20 bp, synthetic construct
  source 1..20: mol_type = other DNA
ccacagcaggcccccacccc

SEQ ID NO: 298123 - DNA, 20 bp, synthetic construct
  source 1..20: mol_type = other DNA
cccacagcaggcccccaccc

SEQ ID NO: 298124 - DNA, 20 bp, synthetic construct
  source 1..20: mol_type = other DNA
acccacagcaggcccccacc

SEQ ID NO: 298125 - DNA, 20 bp, synthetic construct
  source 1..20: mol_type = other DNA
gacccacagcaggcccccac

SEQ ID NO: 298126 - DNA, 20 bp, synthetic construct
  source 1..20: mol_type = other DNA
tgacccacagcaggccccca

SEQ ID NO: 298127 - DNA, 20 bp, synthetic construct
  source 1..20: mol_type = other DNA
ctgacccacagcaggccccc

SEQ ID NO: 298128 - DNA, 20 bp, synthetic construct
  source 1..20: mol_type = other DNA
actgacccacagcaggcccc

SEQ ID NO: 298129 - DNA, 20 bp, synthetic construct
  source 1..20: mol_type = other DNA
cactgacccacagcaggccc

SEQ ID NO: 298130 - DNA, 20 bp, synthetic construct
  source 1..20: mol_type = other DNA
acactgacccacagcaggcc

SEQ ID NO: 298131 - DNA, 20 bp, synthetic construct
  source 1..20: mol_type = other DNA
cacactgacccacagcaggc

SEQ ID NO: 298132 - DNA, 20 bp, synthetic construct
  source 1..20: mol_type = other DNA
gcacactgacccacagcagg

SEQ ID NO: 298133 - DNA, 20 bp, synthetic construct
  source 1..20: mol_type = other DNA
ggcacactgacccacagcag

SEQ ID NO: 298134 - DNA, 20 bp, synthetic construct
  source 1..20: mol_type = other DNA
tggcacactgacccacagca

SEQ ID NO: 298135 - DNA, 20 bp, synthetic construct
  source 1..20: mol_type = other DNA
gtggcacactgacccacagc

SEQ ID NO: 298136 - DNA, 20 bp, synthetic construct
  source 1..20: mol_type = other DNA
ggtggcacactgacccacag

SEQ ID NO: 298137 - DNA, 20 bp, synthetic construct
  source 1..20: mol_type = other DNA
gggtggcacactgacccaca

SEQ ID NO: 298138 - DNA, 20 bp, synthetic construct
  source 1..20: mol_type = other DNA
agggtggcacactgacccac

SEQ ID NO: 298139 - DNA, 20 bp, synthetic construct
  source 1..20: mol_type = other DNA
gagggtggcacactgaccca

SEQ ID NO: 298140 - DNA, 20 bp, synthetic construct
  source 1..20: mol_type = other DNA
agagggtggcacactgaccc

SEQ ID NO: 298141 - DNA, 20 bp, synthetic construct
  source 1..20: mol_type = other DNA
cagagggtggcacactgacc

SEQ ID NO: 298142 - DNA, 20 bp, synthetic construct
  source 1..20: mol_type = other DNA
gcagagggtggcacactgac

SEQ ID NO: 298143 - DNA, 20 bp, synthetic construct
  source 1..20: mol_type = other DNA
tgcagagggtggcacactga

SEQ ID NO: 298144 - DNA, 20 bp, synthetic construct
  source 1..20: mol_type = other DNA
ctgcagagggtggcacactg

SEQ ID NO: 298145 - DNA, 20 bp, synthetic construct
  source 1..20: mol_type = other DNA
cctgcagagggtggcacact

SEQ ID NO: 298146 - DNA, 20 bp, synthetic construct
  source 1..20: mol_type = other DNA
ccctgcagagggtggcacac

SEQ ID NO: 298147 - DNA, 20 bp, synthetic construct
  source 1..20: mol_type = other DNA
gccctgcagagggtggcaca

SEQ ID NO: 298148 - DNA, 20 bp, synthetic construct
  source 1..20: mol_type = other DNA
tgccctgcagagggtggcac

SEQ ID NO: 298149 - DNA, 20 bp, synthetic construct
  source 1..20: mol_type = other DNA
ctgccctgcagagggtggca

SEQ ID NO: 298150 - DNA, 20 bp, synthetic construct
  source 1..20: mol_type = other DNA
gctgccctgcagagggtggc

SEQ ID NO: 298151 - DNA, 20 bp, synthetic construct
  source 1..20: mol_type = other DNA
ggctgccctgcagagggtgg

SEQ ID NO: 298152 - DNA, 20 bp, synthetic construct
  source 1..20: mol_type = other DNA
aggctgccctgcagagggtg

SEQ ID NO: 298153 - DNA, 20 bp, synthetic construct
  source 1..20: mol_type = other DNA
caggctgccctgcagagggt

SEQ ID NO: 298154 - DNA, 20 bp, synthetic construct
  source 1..20: mol_type = other DNA
acaggctgccctgcagaggg

SEQ ID NO: 298155 - DNA, 20 bp, synthetic construct
  source 1..20: mol_type = other DNA
cacaggctgccctgcagagg

SEQ ID NO: 298156 - DNA, 20 bp, synthetic construct
  source 1..20: mol_type = other DNA
ccacaggctgccctgcagag

SEQ ID NO: 298157 - DNA, 20 bp, synthetic construct
  source 1..20: mol_type = other DNA
cccacaggctgccctgcaga

SEQ ID NO: 298158 - DNA, 20 bp, synthetic construct
  source 1..20: mol_type = other DNA
tcccacaggctgccctgcag

SEQ ID NO: 298159 - DNA, 20 bp, synthetic construct
  source 1..20: mol_type = other DNA
ctcccacaggctgccctgca

SEQ ID NO: 298160 - DNA, 20 bp, synthetic construct
  source 1..20: mol_type = other DNA
tctcccacaggctgccctgc

SEQ ID NO: 298161 - DNA, 20 bp, synthetic construct
  source 1..20: mol_type = other DNA
ttctcccacaggctgccctg

SEQ ID NO: 298162 - DNA, 20 bp, synthetic construct
  source 1..20: mol_type = other DNA
cttctcccacaggctgccct

SEQ ID NO: 298163 - DNA, 20 bp, synthetic construct
  source 1..20: mol_type = other DNA
ccttctcccacaggctgccc

SEQ ID NO: 298164 - DNA, 20 bp, synthetic construct
  source 1..20: mol_type = other DNA
cccttctcccacaggctgcc

SEQ ID NO: 298165 - DNA, 20 bp, synthetic construct
  source 1..20: mol_type = other DNA
tcccttctcccacaggctgc

SEQ ID NO: 298166 - DNA, 20 bp, synthetic construct
  source 1..20: mol_type = other DNA
gtcccttctcccacaggctg

SEQ ID NO: 298167 - DNA, 20 bp, synthetic construct
  source 1..20: mol_type = other DNA
tgtcccttctcccacaggct

SEQ ID NO: 298168 - DNA, 20 bp, synthetic construct
  source 1..20: mol_type = other DNA
ctgtcccttctcccacaggc

SEQ ID NO: 298169 - DNA, 20 bp, synthetic construct
  source 1..20: mol_type = other DNA
gctgtcccttctcccacagg

SEQ ID NO: 298170 - DNA, 20 bp, synthetic construct
  source 1..20: mol_type = other DNA
cgctgtcccttctcccacag

SEQ ID NO: 298171 - DNA, 20 bp, synthetic construct
  source 1..20: mol_type = other DNA
ccgctgtcccttctcccaca

SEQ ID NO: 298172 - DNA, 20 bp, synthetic construct
  source 1..20: mol_type = other DNA
cccgctgtcccttctcccac

SEQ ID NO: 298173 - DNA, 20 bp, synthetic construct
  source 1..20: mol_type = other DNA
acccgctgtcccttctccca

SEQ ID NO: 298174 - DNA, 20 bp, synthetic construct
  source 1..20: mol_type = other DNA
tacccgctgtcccttctccc

SEQ ID NO: 298175 - DNA, 20 bp, synthetic construct
  source 1..20: mol_type = other DNA
ttacccgctgtcccttctcc

SEQ ID NO: 298176 - DNA, 20 bp, synthetic construct
  source 1..20: mol_type = other DNA
tttacccgctgtcccttctc

SEQ ID NO: 298177 - DNA, 20 bp, synthetic construct
  source 1..20: mol_type = other DNA
ttttacccgctgtcccttct

SEQ ID NO: 298178 - DNA, 20 bp, synthetic construct
  source 1..20: mol_type = other DNA
tttttacccgctgtcccttc

SEQ ID NO: 298179 - DNA, 20 bp, synthetic construct
  source 1..20: mol_type = other DNA
ctttttacccgctgtccctt

SEQ ID NO: 298180 - DNA, 20 bp, synthetic construct
  source 1..20: mol_type = other DNA
tctttttacccgctgtccct

SEQ ID NO: 298181 - DNA, 20 bp, synthetic construct
  source 1..20: mol_type = other DNA
ctctttttacccgctgtccc

SEQ ID NO: 298182 - DNA, 20 bp, synthetic construct
  source 1..20: mol_type = other DNA
tctctttttacccgctgtcc

SEQ ID NO: 298183 - DNA, 20 bp, synthetic construct
  source 1..20: mol_type = other DNA
ttctctttttacccgctgtc

SEQ ID NO: 298184 - DNA, 20 bp, synthetic construct
  source 1..20: mol_type = other DNA
cttctctttttacccgctgt

SEQ ID NO: 298185 - DNA, 20 bp, synthetic construct
  source 1..20: mol_type = other DNA
ccttctctttttacccgctg

SEQ ID NO: 298186 - DNA, 20 bp, synthetic construct
  source 1..20: mol_type = other DNA
gccttctctttttacccgct

SEQ ID NO: 298187 - DNA, 20 bp, synthetic construct
  source 1..20: mol_type = other DNA
tgccttctctttttacccgc

SEQ ID NO: 298188 - DNA, 20 bp, synthetic construct
  source 1..20: mol_type = other DNA
ttgccttctctttttacccg

SEQ ID NO: 298189 - DNA, 20 bp, synthetic construct
  source 1..20: mol_type = other DNA
cttgccttctctttttaccc

SEQ ID NO: 298190 - DNA, 20 bp, synthetic construct
  source 1..20: mol_type = other DNA
gcttgccttctctttttacc

SEQ ID NO: 298191 - DNA, 20 bp, synthetic construct
  source 1..20: mol_type = other DNA
agcttgccttctctttttac

SEQ ID NO: 298192 - DNA, 20 bp, synthetic construct
  source 1..20: mol_type = other DNA
cagcttgccttctcttttta

SEQ ID NO: 298193 - DNA, 20 bp, synthetic construct
  source 1..20: mol_type = other DNA
ccagcttgccttctcttttt

SEQ ID NO: 298194 - DNA, 20 bp, synthetic construct
  source 1..20: mol_type = other DNA
gccagcttgccttctctttt

SEQ ID NO: 298195 - DNA, 20 bp, synthetic construct
  source 1..20: mol_type = other DNA
tgccagcttgccttctcttt

SEQ ID NO: 298196 - DNA, 20 bp, synthetic construct
  source 1..20: mol_type = other DNA
ctgccagcttgccttctctt

SEQ ID NO: 298197 - DNA, 20 bp, synthetic construct
  source 1..20: mol_type = other DNA
cctgccagcttgccttctct

SEQ ID NO: 298198 - DNA, 20 bp, synthetic construct
  source 1..20: mol_type = other DNA
tcctgccagcttgccttctc

SEQ ID NO: 298199 - DNA, 20 bp, synthetic construct
  source 1..20: mol_type = other DNA
ctcctgccagcttgccttct

SEQ ID NO: 298200 - DNA, 20 bp, synthetic construct
  source 1..20: mol_type = other DNA
cctcctgccagcttgccttc

SEQ ID NO: 298201 - DNA, 20 bp, synthetic construct
  source 1..20: mol_type = other DNA
ccctcctgccagcttgcctt

SEQ ID NO: 298202 - DNA, 20 bp, synthetic construct
  source 1..20: mol_type = other DNA
accctcctgccagcttgcct

SEQ ID NO: 298203 - DNA, 20 bp, synthetic construct
  source 1..20: mol_type = other DNA
caccctcctgccagcttgcc

SEQ ID NO: 298204 - DNA, 20 bp, synthetic construct
  source 1..20: mol_type = other DNA
ccaccctcctgccagcttgc

SEQ ID NO: 298205 - DNA, 20 bp, synthetic construct
  source 1..20: mol_type = other DNA
gccaccctcctgccagcttg

SEQ ID NO: 298206 - DNA, 20 bp, synthetic construct
  source 1..20: mol_type = other DNA
tgccaccctcctgccagctt

SEQ ID NO: 298207 - DNA, 20 bp, synthetic construct
  source 1..20: mol_type = other DNA
gtgccaccctcctgccagct

SEQ ID NO: 298208 - DNA, 20 bp, synthetic construct
  source 1..20: mol_type = other DNA
agtgccaccctcctgccagc

SEQ ID NO: 298209 - DNA, 20 bp, synthetic construct
  source 1..20: mol_type = other DNA
aagtgccaccctcctgccag

SEQ ID NO: 298210 - DNA, 20 bp, synthetic construct
  source 1..20: mol_type = other DNA
gaagtgccaccctcctgcca

SEQ ID NO: 298211 - DNA, 20 bp, synthetic construct
  source 1..20: mol_type = other DNA
cgaagtgccaccctcctgcc

SEQ ID NO: 298212 - DNA, 20 bp, synthetic construct
  source 1..20: mol_type = other DNA
acgaagtgccaccctcctgc

SEQ ID NO: 298213 - DNA, 20 bp, synthetic construct
  source 1..20: mol_type = other DNA
cacgaagtgccaccctcctg

SEQ ID NO: 298214 - DNA, 20 bp, synthetic construct
  source 1..20: mol_type = other DNA
ccacgaagtgccaccctcct

SEQ ID NO: 298215 - DNA, 20 bp, synthetic construct
  source 1..20: mol_type = other DNA
tccacgaagtgccaccctcc

SEQ ID NO: 298216 - DNA, 20 bp, synthetic construct
  source 1..20: mol_type = other DNA
atccacgaagtgccaccctc

SEQ ID NO: 298217 - DNA, 20 bp, synthetic construct
  source 1..20: mol_type = other DNA
catccacgaagtgccaccct

SEQ ID NO: 298218 - DNA, 20 bp, synthetic construct
  source 1..20: mol_type = other DNA
tcatccacgaagtgccaccc

SEQ ID NO: 298219 - DNA, 20 bp, synthetic construct
  source 1..20: mol_type = other DNA
gtcatccacgaagtgccacc

SEQ ID NO: 298220 - DNA, 20 bp, synthetic construct
  source 1..20: mol_type = other DNA
ggtcatccacgaagtgccac

SEQ ID NO: 298221 - DNA, 20 bp, synthetic construct
  source 1..20: mol_type = other DNA
aggtcatccacgaagtgcca

SEQ ID NO: 298222 - DNA, 20 bp, synthetic construct
  source 1..20: mol_type = other DNA
gaggtcatccacgaagtgcc

SEQ ID NO: 298223 - DNA, 20 bp, synthetic construct
  source 1..20: mol_type = other DNA
ggaggtcatccacgaagtgc

SEQ ID NO: 298224 - DNA, 20 bp, synthetic construct
  source 1..20: mol_type = other DNA
aggaggtcatccacgaagtg

SEQ ID NO: 298225 - DNA, 20 bp, synthetic construct
  source 1..20: mol_type = other DNA
aaggaggtcatccacgaagt

SEQ ID NO: 298226 - DNA, 20 bp, synthetic construct
  source 1..20: mol_type = other DNA
taaggaggtcatccacgaag

SEQ ID NO: 298227 - DNA, 20 bp, synthetic construct
  source 1..20: mol_type = other DNA
ctaaggaggtcatccacgaa

SEQ ID NO: 298228 - DNA, 20 bp, synthetic construct
  source 1..20: mol_type = other DNA
tctaaggaggtcatccacga

SEQ ID NO: 298229 - DNA, 20 bp, synthetic construct
  source 1..20: mol_type = other DNA
ttctaaggaggtcatccacg

SEQ ID NO: 298230 - DNA, 20 bp, synthetic construct
  source 1..20: mol_type = other DNA
tttctaaggaggtcatccac

SEQ ID NO: 298231 - DNA, 20 bp, synthetic construct
  source 1..20: mol_type = other DNA
ttttctaaggaggtcatcca

SEQ ID NO: 298232 - DNA, 20 bp, synthetic construct
  source 1..20: mol_type = other DNA
cttttctaaggaggtcatcc

SEQ ID NO: 298233 - DNA, 20 bp, synthetic construct
  source 1..20: mol_type = other DNA
tcttttctaaggaggtcatc

SEQ ID NO: 298234 - DNA, 20 bp, synthetic construct
  source 1..20: mol_type = other DNA
gtcttttctaaggaggtcat

SEQ ID NO: 298235 - DNA, 20 bp, synthetic construct
  source 1..20: mol_type = other DNA
agtcttttctaaggaggtca

SEQ ID NO: 298236 - DNA, 20 bp, synthetic construct
  source 1..20: mol_type = other DNA
cagtcttttctaaggaggtc

SEQ ID NO: 298237 - DNA, 20 bp, synthetic construct
  source 1..20: mol_type = other DNA
tcagtcttttctaaggaggt

SEQ ID NO: 298238 - DNA, 20 bp, synthetic construct
  source 1..20: mol_type = other DNA
gtcagtcttttctaaggagg

SEQ ID NO: 298239 - DNA, 20 bp, synthetic construct
  source 1..20: mol_type = other DNA
ggtcagtcttttctaaggag

SEQ ID NO: 298240 - DNA, 20 bp, synthetic construct
  source 1..20: mol_type = other DNA
aggtcagtcttttctaagga

SEQ ID NO: 298241 - DNA, 20 bp, synthetic construct
  source 1..20: mol_type = other DNA
aaggtcagtcttttctaagg

SEQ ID NO: 298242 - DNA, 20 bp, synthetic construct
  source 1..20: mol_type = other DNA
caaggtcagtcttttctaag

SEQ ID NO: 298243 - DNA, 20 bp, synthetic construct
  source 1..20: mol_type = other DNA
tcaaggtcagtcttttctaa

SEQ ID NO: 298244 - DNA, 20 bp, synthetic construct
  source 1..20: mol_type = other DNA
atcaaggtcagtcttttcta

SEQ ID NO: 298245 - DNA, 20 bp, synthetic construct
  source 1..20: mol_type = other DNA
catcaaggtcagtcttttct

SEQ ID NO: 298246 - DNA, 20 bp, synthetic construct
  source 1..20: mol_type = other DNA
acatcaaggtcagtcttttc

SEQ ID NO: 298247 - DNA, 20 bp, synthetic construct
  source 1..20: mol_type = other DNA
gacatcaaggtcagtctttt

SEQ ID NO: 298248 - DNA, 20 bp, synthetic construct
  source 1..20: mol_type = other DNA
agacatcaaggtcagtcttt

SEQ ID NO: 298249 - DNA, 20 bp, synthetic construct
  source 1..20: mol_type = other DNA
aagacatcaaggtcagtctt

SEQ ID NO: 298250 - DNA, 20 bp, synthetic construct
  source 1..20: mol_type = other DNA
caagacatcaaggtcagtct

SEQ ID NO: 298251 - DNA, 20 bp, synthetic construct
  source 1..20: mol_type = other DNA
tcaagacatcaaggtcagtc

SEQ ID NO: 298252 - DNA, 20 bp, synthetic construct
  source 1..20: mol_type = other DNA
ctcaagacatcaaggtcagt

SEQ ID NO: 298253 - DNA, 20 bp, synthetic construct
  source 1..20: mol_type = other DNA
tctcaagacatcaaggtcag

SEQ ID NO: 298254 - DNA, 20 bp, synthetic construct
  source 1..20: mol_type = other DNA
ctctcaagacatcaaggtca

SEQ ID NO: 298255 - DNA, 20 bp, synthetic construct
  source 1..20: mol_type = other DNA
gctctcaagacatcaaggtc

SEQ ID NO: 298256 - DNA, 20 bp, synthetic construct
  source 1..20: mol_type = other DNA
cgctctcaagacatcaaggt

SEQ ID NO: 298257 - DNA, 20 bp, synthetic construct
  source 1..20: mol_type = other DNA
gcgctctcaagacatcaagg

SEQ ID NO: 298258 - DNA, 20 bp, synthetic construct
  source 1..20: mol_type = other DNA
agcgctctcaagacatcaag

SEQ ID NO: 298259 - DNA, 20 bp, synthetic construct
  source 1..20: mol_type = other DNA
cagcgctctcaagacatcaa

SEQ ID NO: 298260 - DNA, 20 bp, synthetic construct
  source 1..20: mol_type = other DNA
ccagcgctctcaagacatca

SEQ ID NO: 298261 - DNA, 20 bp, synthetic construct
  source 1..20: mol_type = other DNA
gccagcgctctcaagacatc

SEQ ID NO: 298262 - DNA, 20 bp, synthetic construct
  source 1..20: mol_type = other DNA
ggccagcgctctcaagacat

SEQ ID NO: 298263 - DNA, 20 bp, synthetic construct
  source 1..20: mol_type = other DNA
aggccagcgctctcaagaca

SEQ ID NO: 298264 - DNA, 20 bp, synthetic construct
  source 1..20: mol_type = other DNA
gaggccagcgctctcaagac

SEQ ID NO: 298265 - DNA, 20 bp, synthetic construct
  source 1..20: mol_type = other DNA
agaggccagcgctctcaaga

SEQ ID NO: 298266 - DNA, 20 bp, synthetic construct
  source 1..20: mol_type = other DNA
aagaggccagcgctctcaag

SEQ ID NO: 298267 - DNA, 20 bp, synthetic construct
  source 1..20: mol_type = other DNA
gaagaggccagcgctctcaa

SEQ ID NO: 298268 - DNA, 20 bp, synthetic construct
  source 1..20: mol_type = other DNA
ggaagaggccagcgctctca

SEQ ID NO: 298269 - DNA, 20 bp, synthetic construct
  source 1..20: mol_type = other DNA
aggaagaggccagcgctctc

SEQ ID NO: 298270 - DNA, 20 bp, synthetic construct
  source 1..20: mol_type = other DNA
gaggaagaggccagcgctct

SEQ ID NO: 298271 - DNA, 20 bp, synthetic construct
  source 1..20: mol_type = other DNA
ggaggaagaggccagcgctc

SEQ ID NO: 298272 - DNA, 20 bp, synthetic construct
  source 1..20: mol_type = other DNA
gggaggaagaggccagcgct

SEQ ID NO: 298273 - DNA, 20 bp, synthetic construct
  source 1..20: mol_type = other DNA
agggaggaagaggccagcgc

SEQ ID NO: 298274 - DNA, 20 bp, synthetic construct
  source 1..20: mol_type = other DNA
gagggaggaagaggccagcg

SEQ ID NO: 298275 - DNA, 20 bp, synthetic construct
  source 1..20: mol_type = other DNA
ggagggaggaagaggccagc

SEQ ID NO: 298276 - DNA, 20 bp, synthetic construct
  source 1..20: mol_type = other DNA
gggagggaggaagaggccag

SEQ ID NO: 298277 - DNA, 20 bp, synthetic construct
  source 1..20: mol_type = other DNA
agggagggaggaagaggcca

SEQ ID NO: 298278 - DNA, 20 bp, synthetic construct
  source 1..20: mol_type = other DNA
cagggagggaggaagaggcc

SEQ ID NO: 298279 - DNA, 20 bp, synthetic construct
  source 1..20: mol_type = other DNA
gcagggagggaggaagaggc

SEQ ID NO: 298280 - DNA, 20 bp, synthetic construct
  source 1..20: mol_type = other DNA
tgcagggagggaggaagagg

SEQ ID NO: 298281 - DNA, 20 bp, synthetic construct
  source 1..20: mol_type = other DNA
ctgcagggagggaggaagag

SEQ ID NO: 298282 - DNA, 20 bp, synthetic construct
  source 1..20: mol_type = other DNA
cctgcagggagggaggaaga

SEQ ID NO: 298283 - DNA, 20 bp, synthetic construct
  source 1..20: mol_type = other DNA
ccctgcagggagggaggaag

SEQ ID NO: 298284 - DNA, 20 bp, synthetic construct
  source 1..20: mol_type = other DNA
accctgcagggagggaggaa

SEQ ID NO: 298285 - DNA, 20 bp, synthetic construct
  source 1..20: mol_type = other DNA
taccctgcagggagggagga

SEQ ID NO: 298286 - DNA, 20 bp, synthetic construct
  source 1..20: mol_type = other DNA
ctaccctgcagggagggagg

SEQ ID NO: 298287 - DNA, 20 bp, synthetic construct
  source 1..20: mol_type = other DNA
cctaccctgcagggagggag

SEQ ID NO: 298288 - DNA, 20 bp, synthetic construct
  source 1..20: mol_type = other DNA
ccctaccctgcagggaggga

SEQ ID NO: 298289 - DNA, 20 bp, synthetic construct
  source 1..20: mol_type = other DNA
cccctaccctgcagggaggg

SEQ ID NO: 298290 - DNA, 20 bp, synthetic construct
  source 1..20: mol_type = other DNA
ccccctaccctgcagggagg

SEQ ID NO: 298291 - DNA, 20 bp, synthetic construct
  source 1..20: mol_type = other DNA
gccccctaccctgcagggag

SEQ ID NO: 298292 - DNA, 20 bp, synthetic construct
  source 1..20: mol_type = other DNA
ggccccctaccctgcaggga

SEQ ID NO: 298293 - DNA, 20 bp, synthetic construct
  source 1..20: mol_type = other DNA
aggccccctaccctgcaggg

SEQ ID NO: 298294 - DNA, 20 bp, synthetic construct
  source 1..20: mol_type = other DNA
caggccccctaccctgcagg

SEQ ID NO: 298295 - DNA, 20 bp, synthetic construct
  source 1..20: mol_type = other DNA
tcaggccccctaccctgcag

SEQ ID NO: 298296 - DNA, 20 bp, synthetic construct
  source 1..20: mol_type = other DNA
ctcaggccccctaccctgca

SEQ ID NO: 298297 - DNA, 20 bp, synthetic construct
  source 1..20: mol_type = other DNA
actcaggccccctaccctgc

SEQ ID NO: 298298 - DNA, 20 bp, synthetic construct
  source 1..20: mol_type = other DNA
aactcaggccccctaccctg

SEQ ID NO: 298299 - DNA, 20 bp, synthetic construct
  source 1..20: mol_type = other DNA
caactcaggccccctaccct

SEQ ID NO: 298300 - DNA, 20 bp, synthetic construct
  source 1..20: mol_type = other DNA
tcaactcaggccccctaccc

SEQ ID NO: 298301 - DNA, 20 bp, synthetic construct
  source 1..20: mol_type = other DNA
ctcaactcaggccccctacc

SEQ ID NO: 298302 - DNA, 20 bp, synthetic construct
  source 1..20: mol_type = other DNA
cctcaactcaggccccctac

SEQ ID NO: 298303 - DNA, 20 bp, synthetic construct
  source 1..20: mol_type = other DNA
ccctcaactcaggcccccta

SEQ ID NO: 298304 - DNA, 20 bp, synthetic construct
  source 1..20: mol_type = other DNA
cccctcaactcaggccccct

SEQ ID NO: 298305 - DNA, 20 bp, synthetic construct
  source 1..20: mol_type = other DNA
gcccctcaactcaggccccc

SEQ ID NO: 298306 - DNA, 20 bp, synthetic construct
  source 1..20: mol_type = other DNA
agcccctcaactcaggcccc

SEQ ID NO: 298307 - DNA, 20 bp, synthetic construct
  source 1..20: mol_type = other DNA
aagcccctcaactcaggccc

SEQ ID NO: 298308 - DNA, 20 bp, synthetic construct
  source 1..20: mol_type = other DNA
gaagcccctcaactcaggcc

SEQ ID NO: 298309 - DNA, 20 bp, synthetic construct
  source 1..20: mol_type = other DNA
ggaagcccctcaactcaggc

SEQ ID NO: 298310 - DNA, 20 bp, synthetic construct
  source 1..20: mol_type = other DNA
gggaagcccctcaactcagg

SEQ ID NO: 298311 - DNA, 20 bp, synthetic construct
  source 1..20: mol_type = other DNA
agggaagcccctcaactcag

SEQ ID NO: 298312 - DNA, 20 bp, synthetic construct
  source 1..20: mol_type = other DNA
gagggaagcccctcaactca

SEQ ID NO: 298313 - DNA, 20 bp, synthetic construct
  source 1..20: mol_type = other DNA
agagggaagcccctcaactc

SEQ ID NO: 298314 - DNA, 20 bp, synthetic construct
  source 1..20: mol_type = other DNA
cagagggaagcccctcaact

SEQ ID NO: 298315 - DNA, 20 bp, synthetic construct
  source 1..20: mol_type = other DNA
gcagagggaagcccctcaac

SEQ ID NO: 298316 - DNA, 20 bp, synthetic construct
  source 1..20: mol_type = other DNA
agcagagggaagcccctcaa

SEQ ID NO: 298317 - DNA, 20 bp, synthetic construct
  source 1..20: mol_type = other DNA
gagcagagggaagcccctca

SEQ ID NO: 298318 - DNA, 20 bp, synthetic construct
  source 1..20: mol_type = other DNA
ggagcagagggaagcccctc

SEQ ID NO: 298319 - DNA, 20 bp, synthetic construct
  source 1..20: mol_type = other DNA
tggagcagagggaagcccct

SEQ ID NO: 298320 - DNA, 20 bp, synthetic construct
  source 1..20: mol_type = other DNA
gtggagcagagggaagcccc

SEQ ID NO: 298321 - DNA, 20 bp, synthetic construct
  source 1..20: mol_type = other DNA
tgtggagcagagggaagccc

SEQ ID NO: 298322 - DNA, 20 bp, synthetic construct
  source 1..20: mol_type = other DNA
ctgtggagcagagggaagcc

SEQ ID NO: 298323 - DNA, 20 bp, synthetic construct
  source 1..20: mol_type = other DNA
tctgtggagcagagggaagc

SEQ ID NO: 298324 - DNA, 20 bp, synthetic construct
  source 1..20: mol_type = other DNA
ttctgtggagcagagggaag

SEQ ID NO: 298325 - DNA, 20 bp, synthetic construct
  source 1..20: mol_type = other DNA
tttctgtggagcagagggaa

SEQ ID NO: 298326 - DNA, 20 bp, synthetic construct
  source 1..20: mol_type = other DNA
gtttctgtggagcagaggga

SEQ ID NO: 298327 - DNA, 20 bp, synthetic construct
  source 1..20: mol_type = other DNA
ggtttctgtggagcagaggg

SEQ ID NO: 298328 - DNA, 20 bp, synthetic construct
  source 1..20: mol_type = other DNA
gggtttctgtggagcagagg

SEQ ID NO: 298329 - DNA, 20 bp, synthetic construct
  source 1..20: mol_type = other DNA
agggtttctgtggagcagag

SEQ ID NO: 298330 - DNA, 20 bp, synthetic construct
  source 1..20: mol_type = other DNA
cagggtttctgtggagcaga

SEQ ID NO: 298331 - DNA, 20 bp, synthetic construct
  source 1..20: mol_type = other DNA
acagggtttctgtggagcag

SEQ ID NO: 298332 - DNA, 20 bp, synthetic construct
  source 1..20: mol_type = other DNA
aacagggtttctgtggagca

SEQ ID NO: 298333 - DNA, 20 bp, synthetic construct
  source 1..20: mol_type = other DNA
aaacagggtttctgtggagc

SEQ ID NO: 298334 - DNA, 20 bp, synthetic construct
  source 1..20: mol_type = other DNA
aaaacagggtttctgtggag

SEQ ID NO: 298335 - DNA, 20 bp, synthetic construct
  source 1..20: mol_type = other DNA
taaaacagggtttctgtgga

SEQ ID NO: 298336 - DNA, 20 bp, synthetic construct
  source 1..20: mol_type = other DNA
ataaaacagggtttctgtgg

SEQ ID NO: 298337 - DNA, 20 bp, synthetic construct
  source 1..20: mol_type = other DNA
aataaaacagggtttctgtg

SEQ ID NO: 298338 - DNA, 20 bp, synthetic construct
  source 1..20: mol_type = other DNA
caataaaacagggtttctgt

SEQ ID NO: 298339 - DNA, 20 bp, synthetic construct
  source 1..20: mol_type = other DNA
tcaataaaacagggtttctg

SEQ ID NO: 298340 - DNA, 20 bp, synthetic construct
  source 1..20: mol_type = other DNA
ctcaataaaacagggtttct

SEQ ID NO: 298341 - DNA, 20 bp, synthetic construct
  source 1..20: mol_type = other DNA
actcaataaaacagggtttc

SEQ ID NO: 298342 - DNA, 20 bp, synthetic construct
  source 1..20: mol_type = other DNA
aactcaataaaacagggttt

SEQ ID NO: 298343 - DNA, 20 bp, synthetic construct
  source 1..20: mol_type = other DNA
gaactcaataaaacagggtt

SEQ ID NO: 298344 - DNA, 20 bp, synthetic construct
  source 1..20: mol_type = other DNA
agaactcaataaaacagggt

SEQ ID NO: 298345 - DNA, 20 bp, synthetic construct
  source 1..20: mol_type = other DNA
cagaactcaataaaacaggg

SEQ ID NO: 298346 - DNA, 20 bp, synthetic construct
  source 1..20: mol_type = other DNA
tcagaactcaataaaacagg

SEQ ID NO: 298347 - DNA, 20 bp, synthetic construct
  source 1..20: mol_type = other DNA
ttcagaactcaataaaacag

SEQ ID NO: 298348 - DNA, 20 bp, synthetic construct
  source 1..20: mol_type = other DNA
cttcagaactcaataaaaca

SEQ ID NO: 298349 - DNA, 20 bp, synthetic construct
  source 1..20: mol_type = other DNA
ccttcagaactcaataaaac

SEQ ID NO: 298350 - DNA, 20 bp, synthetic construct
  source 1..20: mol_type = other DNA
accttcagaactcaataaaa

SEQ ID NO: 298351 - DNA, 20 bp, synthetic construct
  source 1..20: mol_type = other DNA
aaccttcagaactcaataaa

SEQ ID NO: 298352 - DNA, 20 bp, synthetic construct
  source 1..20: mol_type = other DNA
caaccttcagaactcaataa

SEQ ID NO: 298353 - DNA, 20 bp, synthetic construct
  source 1..20: mol_type = other DNA
ccaaccttcagaactcaata

SEQ ID NO: 298354 - DNA, 20 bp, synthetic construct
  source 1..20: mol_type = other DNA
tccaaccttcagaactcaat

SEQ ID NO: 298355 - DNA, 20 bp, synthetic construct
  source 1..20: mol_type = other DNA
ttccaaccttcagaactcaa

SEQ ID NO: 298356 - DNA, 20 bp, synthetic construct
  source 1..20: mol_type = other DNA
gttccaaccttcagaactca

SEQ ID NO: 298357 - DNA, 20 bp, synthetic construct
  source 1..20: mol_type = other DNA
agttccaaccttcagaactc

SEQ ID NO: 298358 - DNA, 20 bp, synthetic construct
  source 1..20: mol_type = other DNA
cagttccaaccttcagaact

SEQ ID NO: 298359 - DNA, 20 bp, synthetic construct
  source 1..20: mol_type = other DNA
gcagttccaaccttcagaac

SEQ ID NO: 298360 - DNA, 20 bp, synthetic construct
  source 1..20: mol_type = other DNA
agcagttccaaccttcagaa

SEQ ID NO: 298361 - DNA, 20 bp, synthetic construct
  source 1..20: mol_type = other DNA
cagcagttccaaccttcaga

SEQ ID NO: 298362 - DNA, 20 bp, synthetic construct
  source 1..20: mol_type = other DNA
gcagcagttccaaccttcag

SEQ ID NO: 298363 - DNA, 20 bp, synthetic construct
  source 1..20: mol_type = other DNA
ggcagcagttccaaccttca

SEQ ID NO: 298364 - DNA, 20 bp, synthetic construct
  source 1..20: mol_type = other DNA
tggcagcagttccaaccttc

SEQ ID NO: 298365 - DNA, 20 bp, synthetic construct
  source 1..20: mol_type = other DNA
atggcagcagttccaacctt

SEQ ID NO: 298366 - DNA, 20 bp, synthetic construct
  source 1..20: mol_type = other DNA
catggcagcagttccaacct

SEQ ID NO: 298367 - DNA, 20 bp, synthetic construct
  source 1..20: mol_type = other DNA
tcatggcagcagttccaacc

SEQ ID NO: 298368 - DNA, 20 bp, synthetic construct
  source 1..20: mol_type = other DNA
atcatggcagcagttccaac

SEQ ID NO: 298369 - DNA, 20 bp, synthetic construct
  source 1..20: mol_type = other DNA
aatcatggcagcagttccaa

SEQ ID NO: 298370 - DNA, 20 bp, synthetic construct
  source 1..20: mol_type = other DNA
aaatcatggcagcagttcca

SEQ ID NO: 298371 - DNA, 20 bp, synthetic construct
  source 1..20: mol_type = other DNA
aaaatcatggcagcagttcc

SEQ ID NO: 298372 - DNA, 20 bp, synthetic construct
  source 1..20: mol_type = other DNA
caaaatcatggcagcagttc

SEQ ID NO: 298373 - DNA, 20 bp, synthetic construct
  source 1..20: mol_type = other DNA
ccaaaatcatggcagcagtt

SEQ ID NO: 298374 - DNA, 20 bp, synthetic construct
  source 1..20: mol_type = other DNA
gccaaaatcatggcagcagt

SEQ ID NO: 298375 - DNA, 20 bp, synthetic construct
  source 1..20: mol_type = other DNA
ggccaaaatcatggcagcag

SEQ ID NO: 298376 - DNA, 20 bp, synthetic construct
  source 1..20: mol_type = other DNA
tggccaaaatcatggcagca

SEQ ID NO: 298377 - DNA, 20 bp, synthetic construct
  source 1..20: mol_type = other DNA
gtggccaaaatcatggcagc

SEQ ID NO: 298378 - DNA, 20 bp, synthetic construct
  source 1..20: mol_type = other DNA
agtggccaaaatcatggcag

SEQ ID NO: 298379 - DNA, 20 bp, synthetic construct
  source 1..20: mol_type = other DNA
aagtggccaaaatcatggca

SEQ ID NO: 298380 - DNA, 20 bp, synthetic construct
  source 1..20: mol_type = other DNA
aaagtggccaaaatcatggc

SEQ ID NO: 298381 - DNA, 20 bp, synthetic construct
  source 1..20: mol_type = other DNA
caaagtggccaaaatcatgg

SEQ ID NO: 298382 - DNA, 20 bp, synthetic construct
  source 1..20: mol_type = other DNA
gcaaagtggccaaaatcatg

SEQ ID NO: 298383 - DNA, 20 bp, synthetic construct
  source 1..20: mol_type = other DNA
tgcaaagtggccaaaatcat

SEQ ID NO: 298384 - DNA, 20 bp, synthetic construct
  source 1..20: mol_type = other DNA
ctgcaaagtggccaaaatca

SEQ ID NO: 298385 - DNA, 20 bp, synthetic construct
  source 1..20: mol_type = other DNA
tctgcaaagtggccaaaatc

SEQ ID NO: 298386 - DNA, 20 bp, synthetic construct
  source 1..20: mol_type = other DNA
gtctgcaaagtggccaaaat

SEQ ID NO: 298387 - DNA, 20 bp, synthetic construct
  source 1..20: mol_type = other DNA
ggtctgcaaagtggccaaaa

SEQ ID NO: 298388 - DNA, 20 bp, synthetic construct
  source 1..20: mol_type = other DNA
aggtctgcaaagtggccaaa

SEQ ID NO: 298389 - DNA, 20 bp, synthetic construct
  source 1..20: mol_type = other DNA
caggtctgcaaagtggccaa

SEQ ID NO: 298390 - DNA, 20 bp, synthetic construct
  source 1..20: mol_type = other DNA
ccaggtctgcaaagtggcca

SEQ ID NO: 298391 - DNA, 20 bp, synthetic construct
  source 1..20: mol_type = other DNA
cccaggtctgcaaagtggcc

SEQ ID NO: 298392 - DNA, 20 bp, synthetic construct
  source 1..20: mol_type = other DNA
tcccaggtctgcaaagtggc

SEQ ID NO: 298393 - DNA, 20 bp, synthetic construct
  source 1..20: mol_type = other DNA
gtcccaggtctgcaaagtgg

SEQ ID NO: 298394 - DNA, 20 bp, synthetic construct
  source 1..20: mol_type = other DNA
agtcccaggtctgcaaagtg

SEQ ID NO: 298395 - DNA, 20 bp, synthetic construct
  source 1..20: mol_type = other DNA
aagtcccaggtctgcaaagt

SEQ ID NO: 298396 - DNA, 20 bp, synthetic construct
  source 1..20: mol_type = other DNA
aaagtcccaggtctgcaaag

SEQ ID NO: 298397 - DNA, 20 bp, synthetic construct
  source 1..20: mol_type = other DNA
taaagtcccaggtctgcaaa

SEQ ID NO: 298398 - DNA, 20 bp, synthetic construct
  source 1..20: mol_type = other DNA
ctaaagtcccaggtctgcaa

SEQ ID NO: 298399 - DNA, 20 bp, synthetic construct
  source 1..20: mol_type = other DNA
cctaaagtcccaggtctgca

SEQ ID NO: 298400 - DNA, 20 bp, synthetic construct
  source 1..20: mol_type = other DNA
ccctaaagtcccaggtctgc

SEQ ID NO: 298401 - DNA, 20 bp, synthetic construct
  source 1..20: mol_type = other DNA
gccctaaagtcccaggtctg

SEQ ID NO: 298402 - DNA, 20 bp, synthetic construct
  source 1..20: mol_type = other DNA
agccctaaagtcccaggtct

SEQ ID NO: 298403 - DNA, 20 bp, synthetic construct
  source 1..20: mol_type = other DNA
tagccctaaagtcccaggtc

SEQ ID NO: 298404 - DNA, 20 bp, synthetic construct
  source 1..20: mol_type = other DNA
ttagccctaaagtcccaggt

SEQ ID NO: 298405 - DNA, 20 bp, synthetic construct
  source 1..20: mol_type = other DNA
gttagccctaaagtcccagg

SEQ ID NO: 298406 - DNA, 20 bp, synthetic construct
  source 1..20: mol_type = other DNA
ggttagccctaaagtcccag

SEQ ID NO: 298407 - DNA, 20 bp, synthetic construct
  source 1..20: mol_type = other DNA
tggttagccctaaagtccca

SEQ ID NO: 298408 - DNA, 20 bp, synthetic construct
  source 1..20: mol_type = other DNA
ctggttagccctaaagtccc

SEQ ID NO: 298409 - DNA, 20 bp, synthetic construct
  source 1..20: mol_type = other DNA
actggttagccctaaagtcc

SEQ ID NO: 298410 - DNA, 20 bp, synthetic construct
  source 1..20: mol_type = other DNA
aactggttagccctaaagtc

SEQ ID NO: 298411 - DNA, 20 bp, synthetic construct
  source 1..20: mol_type = other DNA
gaactggttagccctaaagt

SEQ ID NO: 298412 - DNA, 20 bp, synthetic construct
  source 1..20: mol_type = other DNA
agaactggttagccctaaag

SEQ ID NO: 298413 - DNA, 20 bp, synthetic construct
  source 1..20: mol_type = other DNA
gagaactggttagccctaaa

SEQ ID NO: 298414 - DNA, 20 bp, synthetic construct
  source 1..20: mol_type = other DNA
agagaactggttagccctaa

SEQ ID NO: 298415 - DNA, 20 bp, synthetic construct
  source 1..20: mol_type = other DNA
aagagaactggttagcccta

SEQ ID NO: 298416 - DNA, 20 bp, synthetic construct
  source 1..20: mol_type = other DNA
aaagagaactggttagccct

SEQ ID NO: 298417 - DNA, 20 bp, synthetic construct
  source 1..20: mol_type = other DNA
caaagagaactggttagccc

SEQ ID NO: 298418 - DNA, 20 bp, synthetic construct
  source 1..20: mol_type = other DNA
acaaagagaactggttagcc

SEQ ID NO: 298419 - DNA, 20 bp, synthetic construct
  source 1..20: mol_type = other DNA
tacaaagagaactggttagc

SEQ ID NO: 298420 - DNA, 20 bp, synthetic construct
  source 1..20: mol_type = other DNA
ttacaaagagaactggttag

SEQ ID NO: 298421 - DNA, 20 bp, synthetic construct
  source 1..20: mol_type = other DNA
cttacaaagagaactggtta

SEQ ID NO: 298422 - DNA, 20 bp, synthetic construct
  source 1..20: mol_type = other DNA
ccttacaaagagaactggtt

SEQ ID NO: 298423 - DNA, 20 bp, synthetic construct
  source 1..20: mol_type = other DNA
tccttacaaagagaactggt

SEQ ID NO: 298424 - DNA, 20 bp, synthetic construct
  source 1..20: mol_type = other DNA
gtccttacaaagagaactgg

SEQ ID NO: 298425 - DNA, 20 bp, synthetic construct
  source 1..20: mol_type = other DNA
agtccttacaaagagaactg

SEQ ID NO: 298426 - DNA, 20 bp, synthetic construct
  source 1..20: mol_type = other DNA
aagtccttacaaagagaact

SEQ ID NO: 298427 - DNA, 20 bp, synthetic construct
  source 1..20: mol_type = other DNA
caagtccttacaaagagaac

SEQ ID NO: 298428 - DNA, 20 bp, synthetic construct
  source 1..20: mol_type = other DNA
acaagtccttacaaagagaa

SEQ ID NO: 298429 - DNA, 20 bp, synthetic construct
  source 1..20: mol_type = other DNA
cacaagtccttacaaagaga

SEQ ID NO: 298430 - DNA, 20 bp, synthetic construct
  source 1..20: mol_type = other DNA
gcacaagtccttacaaagag

SEQ ID NO: 298431 - DNA, 20 bp, synthetic construct
  source 1..20: mol_type = other DNA
ggcacaagtccttacaaaga

SEQ ID NO: 298432 - DNA, 20 bp, synthetic construct
  source 1..20: mol_type = other DNA
aggcacaagtccttacaaag

SEQ ID NO: 298433 - DNA, 20 bp, synthetic construct
  source 1..20: mol_type = other DNA
gaggcacaagtccttacaaa

SEQ ID NO: 298434 - DNA, 20 bp, synthetic construct
  source 1..20: mol_type = other DNA
agaggcacaagtccttacaa

SEQ ID NO: 298435 - DNA, 20 bp, synthetic construct
  source 1..20: mol_type = other DNA
aagaggcacaagtccttaca

SEQ ID NO: 298436 - DNA, 20 bp, synthetic construct
  source 1..20: mol_type = other DNA
caagaggcacaagtccttac

SEQ ID NO: 298437 - DNA, 20 bp, synthetic construct
  source 1..20: mol_type = other DNA
ccaagaggcacaagtcctta

SEQ ID NO: 298438 - DNA, 20 bp, synthetic construct
  source 1..20: mol_type = other DNA
cccaagaggcacaagtcctt

SEQ ID NO: 298439 - DNA, 20 bp, synthetic construct
  source 1..20: mol_type = other DNA
tcccaagaggcacaagtcct

SEQ ID NO: 298440 - DNA, 20 bp, synthetic construct
  source 1..20: mol_type = other DNA
ctcccaagaggcacaagtcc

SEQ ID NO: 298441 - DNA, 20 bp, synthetic construct
  source 1..20: mol_type = other DNA
tctcccaagaggcacaagtc

SEQ ID NO: 298442 - DNA, 20 bp, synthetic construct
  source 1..20: mol_type = other DNA
gtctcccaagaggcacaagt

SEQ ID NO: 298443 - DNA, 20 bp, synthetic construct
  source 1..20: mol_type = other DNA
cgtctcccaagaggcacaag

SEQ ID NO: 298444 - DNA, 20 bp, synthetic construct
  source 1..20: mol_type = other DNA
acgtctcccaagaggcacaa

SEQ ID NO: 298445 - DNA, 20 bp, synthetic construct
  source 1..20: mol_type = other DNA
gacgtctcccaagaggcaca

SEQ ID NO: 298446 - DNA, 20 bp, synthetic construct
  source 1..20: mol_type = other DNA
ggacgtctcccaagaggcac

SEQ ID NO: 298447 - DNA, 20 bp, synthetic construct
  source 1..20: mol_type = other DNA
tggacgtctcccaagaggca

SEQ ID NO: 298448 - DNA, 20 bp, synthetic construct
  source 1..20: mol_type = other DNA
gtggacgtctcccaagaggc

SEQ ID NO: 298449 - DNA, 20 bp, synthetic construct
  source 1..20: mol_type = other DNA
ggtggacgtctcccaagagg

SEQ ID NO: 298450 - DNA, 20 bp, synthetic construct
  source 1..20: mol_type = other DNA
gggtggacgtctcccaagag

SEQ ID NO: 298451 - DNA, 20 bp, synthetic construct
  source 1..20: mol_type = other DNA
cgggtggacgtctcccaaga

SEQ ID NO: 298452 - DNA, 20 bp, synthetic construct
  source 1..20: mol_type = other DNA
acgggtggacgtctcccaag

SEQ ID NO: 298453 - DNA, 20 bp, synthetic construct
  source 1..20: mol_type = other DNA
aacgggtggacgtctcccaa

SEQ ID NO: 298454 - DNA, 20 bp, synthetic construct
  source 1..20: mol_type = other DNA
aaacgggtggacgtctccca

SEQ ID NO: 298455 - DNA, 20 bp, synthetic construct
  source 1..20: mol_type = other DNA
gaaacgggtggacgtctccc

SEQ ID NO: 298456 - DNA, 20 bp, synthetic construct
  source 1..20: mol_type = other DNA
ggaaacgggtggacgtctcc

SEQ ID NO: 298457 - DNA, 20 bp, synthetic construct
  source 1..20: mol_type = other DNA
tggaaacgggtggacgtctc

SEQ ID NO: 298458 - DNA, 20 bp, synthetic construct
  source 1..20: mol_type = other DNA
ttggaaacgggtggacgtct

SEQ ID NO: 298459 - DNA, 20 bp, synthetic construct
  source 1..20: mol_type = other DNA
cttggaaacgggtggacgtc

SEQ ID NO: 298460 - DNA, 20 bp, synthetic construct
  source 1..20: mol_type = other DNA
gcttggaaacgggtggacgt

SEQ ID NO: 298461 - DNA, 20 bp, synthetic construct
  source 1..20: mol_type = other DNA
ggcttggaaacgggtggacg

SEQ ID NO: 298462 - DNA, 20 bp, synthetic construct
  source 1..20: mol_type = other DNA
aggcttggaaacgggtggac

SEQ ID NO: 298463 - DNA, 20 bp, synthetic construct
  source 1..20: mol_type = other DNA
caggcttggaaacgggtgga

SEQ ID NO: 298464 - DNA, 20 bp, synthetic construct
  source 1..20: mol_type = other DNA
ccaggcttggaaacgggtgg

SEQ ID NO: 298465 - DNA, 20 bp, synthetic construct
  source 1..20: mol_type = other DNA
cccaggcttggaaacgggtg

SEQ ID NO: 298466 - DNA, 20 bp, synthetic construct
  source 1..20: mol_type = other DNA
gcccaggcttggaaacgggt

SEQ ID NO: 298467 - DNA, 20 bp, synthetic construct
  source 1..20: mol_type = other DNA
ggcccaggcttggaaacggg

SEQ ID NO: 298468 - DNA, 20 bp, synthetic construct
  source 1..20: mol_type = other DNA
tggcccaggcttggaaacgg

SEQ ID NO: 298469 - DNA, 20 bp, synthetic construct
  source 1..20: mol_type = other DNA
gtggcccaggcttggaaacg

SEQ ID NO: 298470 - DNA, 20 bp, synthetic construct
  source 1..20: mol_type = other DNA
agtggcccaggcttggaaac

SEQ ID NO: 298471 - DNA, 20 bp, synthetic construct
  source 1..20: mol_type = other DNA
cagtggcccaggcttggaaa

SEQ ID NO: 298472 - DNA, 20 bp, synthetic construct
  source 1..20: mol_type = other DNA
ccagtggcccaggcttggaa

SEQ ID NO: 298473 - DNA, 20 bp, synthetic construct
  source 1..20: mol_type = other DNA
gccagtggcccaggcttgga

SEQ ID NO: 298474 - DNA, 20 bp, synthetic construct
  source 1..20: mol_type = other DNA
tgccagtggcccaggcttgg

SEQ ID NO: 298475 - DNA, 20 bp, synthetic construct
  source 1..20: mol_type = other DNA
atgccagtggcccaggcttg

SEQ ID NO: 298476 - DNA, 20 bp, synthetic construct
  source 1..20: mol_type = other DNA
gatgccagtggcccaggctt

SEQ ID NO: 298477 - DNA, 20 bp, synthetic construct
  source 1..20: mol_type = other DNA
agatgccagtggcccaggct

SEQ ID NO: 298478 - DNA, 20 bp, synthetic construct
  source 1..20: mol_type = other DNA
gagatgccagtggcccaggc

SEQ ID NO: 298479 - DNA, 20 bp, synthetic construct
  source 1..20: mol_type = other DNA
agagatgccagtggcccagg

SEQ ID NO: 298480 - DNA, 20 bp, synthetic construct
  source 1..20: mol_type = other DNA
cagagatgccagtggcccag

SEQ ID NO: 298481 - DNA, 20 bp, synthetic construct
  source 1..20: mol_type = other DNA
ccagagatgccagtggccca

SEQ ID NO: 298482 - DNA, 20 bp, synthetic construct
  source 1..20: mol_type = other DNA
tccagagatgccagtggccc

SEQ ID NO: 298483 - DNA, 20 bp, synthetic construct
  source 1..20: mol_type = other DNA
ctccagagatgccagtggcc

SEQ ID NO: 298484 - DNA, 20 bp, synthetic construct
  source 1..20: mol_type = other DNA
actccagagatgccagtggc

SEQ ID NO: 298485 - DNA, 20 bp, synthetic construct
  source 1..20: mol_type = other DNA
cactccagagatgccagtgg

SEQ ID NO: 298486 - DNA, 20 bp, synthetic construct
  source 1..20: mol_type = other DNA
acactccagagatgccagtg

SEQ ID NO: 298487 - DNA, 20 bp, synthetic construct
  source 1..20: mol_type = other DNA
cacactccagagatgccagt

SEQ ID NO: 298488 - DNA, 20 bp, synthetic construct
  source 1..20: mol_type = other DNA
acacactccagagatgccag

SEQ ID NO: 298489 - DNA, 20 bp, synthetic construct
  source 1..20: mol_type = other DNA
cacacactccagagatgcca

SEQ ID NO: 298490 - DNA, 20 bp, synthetic construct
  source 1..20: mol_type = other DNA
ccacacactccagagatgcc

SEQ ID NO: 298491 - DNA, 20 bp, synthetic construct
  source 1..20: mol_type = other DNA
cccacacactccagagatgc

SEQ ID NO: 298492 - DNA, 20 bp, synthetic construct
  source 1..20: mol_type = other DNA
ccccacacactccagagatg

SEQ ID NO: 298493 - DNA, 20 bp, synthetic construct
  source 1..20: mol_type = other DNA
cccccacacactccagagat

SEQ ID NO: 298494 - DNA, 20 bp, synthetic construct
  source 1..20: mol_type = other DNA
acccccacacactccagaga

SEQ ID NO: 298495 - DNA, 20 bp, synthetic construct
  source 1..20: mol_type = other DNA
gacccccacacactccagag

SEQ ID NO: 298496 - DNA, 20 bp, synthetic construct
  source 1..20: mol_type = other DNA
agacccccacacactccaga

SEQ ID NO: 298497 - DNA, 20 bp, synthetic construct
  source 1..20: mol_type = other DNA
cagacccccacacactccag

SEQ ID NO: 298498 - DNA, 20 bp, synthetic construct
  source 1..20: mol_type = other DNA
ccagacccccacacactcca

SEQ ID NO: 298499 - DNA, 20 bp, synthetic construct
  source 1..20: mol_type = other DNA
cccagacccccacacactcc

SEQ ID NO: 298500 - DNA, 20 bp, synthetic construct
  source 1..20: mol_type = other DNA
tcccagacccccacacactc

SEQ ID NO: 298501 - DNA, 20 bp, synthetic construct
  source 1..20: mol_type = other DNA
ctcccagacccccacacact

SEQ ID NO: 298502 - DNA, 20 bp, synthetic construct
  source 1..20: mol_type = other DNA
cctcccagacccccacacac

SEQ ID NO: 298503 - DNA, 20 bp, synthetic construct
  source 1..20: mol_type = other DNA
gcctcccagacccccacaca

SEQ ID NO: 298504 - DNA, 20 bp, synthetic construct
  source 1..20: mol_type = other DNA
tgcctcccagacccccacac

SEQ ID NO: 298505 - DNA, 20 bp, synthetic construct
  source 1..20: mol_type = other DNA
ctgcctcccagacccccaca

SEQ ID NO: 298506 - DNA, 20 bp, synthetic construct
  source 1..20: mol_type = other DNA
cctgcctcccagacccccac

SEQ ID NO: 298507 - DNA, 20 bp, synthetic construct
  source 1..20: mol_type = other DNA
acctgcctcccagaccccca

SEQ ID NO: 298508 - DNA, 20 bp, synthetic construct
  source 1..20: mol_type = other DNA
gacctgcctcccagaccccc

SEQ ID NO: 298509 - DNA, 20 bp, synthetic construct
  source 1..20: mol_type = other DNA
ggacctgcctcccagacccc

SEQ ID NO: 298510 - DNA, 20 bp, synthetic construct
  source 1..20: mol_type = other DNA
gggacctgcctcccagaccc

SEQ ID NO: 298511 - DNA, 20 bp, synthetic construct
  source 1..20: mol_type = other DNA
cgggacctgcctcccagacc

SEQ ID NO: 298512 - DNA, 20 bp, synthetic construct
  source 1..20: mol_type = other DNA
tcgggacctgcctcccagac

SEQ ID NO: 298513 - DNA, 20 bp, synthetic construct
  source 1..20: mol_type = other DNA
ctcgggacctgcctcccaga

SEQ ID NO: 298514 - DNA, 20 bp, synthetic construct
  source 1..20: mol_type = other DNA
gctcgggacctgcctcccag

SEQ ID NO: 298515 - DNA, 20 bp, synthetic construct
  source 1..20: mol_type = other DNA
ggctcgggacctgcctccca

SEQ ID NO: 298516 - DNA, 20 bp, synthetic construct
  source 1..20: mol_type = other DNA
gggctcgggacctgcctccc

SEQ ID NO: 298517 - DNA, 20 bp, synthetic construct
  source 1..20: mol_type = other DNA
ggggctcgggacctgcctcc

SEQ ID NO: 298518 - DNA, 20 bp, synthetic construct
  source 1..20: mol_type = other DNA
gggggctcgggacctgcctc

SEQ ID NO: 298519 - DNA, 20 bp, synthetic construct
  source 1..20: mol_type = other DNA
agggggctcgggacctgcct

SEQ ID NO: 298520 - DNA, 20 bp, synthetic construct
  source 1..20: mol_type = other DNA
cagggggctcgggacctgcc

SEQ ID NO: 298521 - DNA, 20 bp, synthetic construct
  source 1..20: mol_type = other DNA
acagggggctcgggacctgc

SEQ ID NO: 298522 - DNA, 20 bp, synthetic construct
  source 1..20: mol_type = other DNA
gacagggggctcgggacctg

SEQ ID NO: 298523 - DNA, 20 bp, synthetic construct
  source 1..20: mol_type = other DNA
ggacagggggctcgggacct

SEQ ID NO: 298524 - DNA, 20 bp, synthetic construct
  source 1..20: mol_type = other DNA
aggacagggggctcgggacc

SEQ ID NO: 298525 - DNA, 20 bp, synthetic construct
  source 1..20: mol_type = other DNA
aaggacagggggctcgggac

SEQ ID NO: 298526 - DNA, 20 bp, synthetic construct
  source 1..20: mol_type = other DNA
gaaggacagggggctcggga

SEQ ID NO: 298527 - DNA, 20 bp, synthetic construct
  source 1..20: mol_type = other DNA
ggaaggacagggggctcggg

SEQ ID NO: 298528 - DNA, 20 bp, synthetic construct
  source 1..20: mol_type = other DNA
gggaaggacagggggctcgg

SEQ ID NO: 298529 - DNA, 20 bp, synthetic construct
  source 1..20: mol_type = other DNA
tgggaaggacagggggctcg

SEQ ID NO: 298530 - DNA, 20 bp, synthetic construct
  source 1..20: mol_type = other DNA
gtgggaaggacagggggctc

SEQ ID NO: 298531 - DNA, 20 bp, synthetic construct
  source 1..20: mol_type = other DNA
cgtgggaaggacagggggct

SEQ ID NO: 298532 - DNA, 20 bp, synthetic construct
  source 1..20: mol_type = other DNA
ccgtgggaaggacagggggc

SEQ ID NO: 298533 - DNA, 20 bp, synthetic construct
  source 1..20: mol_type = other DNA
gccgtgggaaggacaggggg

SEQ ID NO: 298534 - DNA, 20 bp, synthetic construct
  source 1..20: mol_type = other DNA
ggccgtgggaaggacagggg

SEQ ID NO: 298535 - DNA, 20 bp, synthetic construct
  source 1..20: mol_type = other DNA
tggccgtgggaaggacaggg

SEQ ID NO: 298536 - DNA, 20 bp, synthetic construct
  source 1..20: mol_type = other DNA
gtggccgtgggaaggacagg

SEQ ID NO: 298537 - DNA, 20 bp, synthetic construct
  source 1..20: mol_type = other DNA
agtggccgtgggaaggacag

SEQ ID NO: 298538 - DNA, 20 bp, synthetic construct
  source 1..20: mol_type = other DNA
cagtggccgtgggaaggaca

SEQ ID NO: 298539 - DNA, 20 bp, synthetic construct
  source 1..20: mol_type = other DNA
gcagtggccgtgggaaggac

SEQ ID NO: 298540 - DNA, 20 bp, synthetic construct
  source 1..20: mol_type = other DNA
tgcagtggccgtgggaagga

SEQ ID NO: 298541 - DNA, 20 bp, synthetic construct
  source 1..20: mol_type = other DNA
ctgcagtggccgtgggaagg

SEQ ID NO: 298542 - DNA, 20 bp, synthetic construct
  source 1..20: mol_type = other DNA
actgcagtggccgtgggaag

SEQ ID NO: 298543 - DNA, 20 bp, synthetic construct
  source 1..20: mol_type = other DNA
gactgcagtggccgtgggaa

SEQ ID NO: 298544 - DNA, 20 bp, synthetic construct
  source 1..20: mol_type = other DNA
tgactgcagtggccgtggga

SEQ ID NO: 298545 - DNA, 20 bp, synthetic construct
  source 1..20: mol_type = other DNA
gtgactgcagtggccgtggg

SEQ ID NO: 298546 - DNA, 20 bp, synthetic construct
  source 1..20: mol_type = other DNA
ggtgactgcagtggccgtgg

SEQ ID NO: 298547 - DNA, 20 bp, synthetic construct
  source 1..20: mol_type = other DNA
gggtgactgcagtggccgtg

SEQ ID NO: 298548 - DNA, 20 bp, synthetic construct
  source 1..20: mol_type = other DNA
ggggtgactgcagtggccgt

SEQ ID NO: 298549 - DNA, 20 bp, synthetic construct
  source 1..20: mol_type = other DNA
cggggtgactgcagtggccg

SEQ ID NO: 298550 - DNA, 20 bp, synthetic construct
  source 1..20: mol_type = other DNA
acggggtgactgcagtggcc

SEQ ID NO: 298551 - DNA, 20 bp, synthetic construct
  source 1..20: mol_type = other DNA
gacggggtgactgcagtggc

SEQ ID NO: 298552 - DNA, 20 bp, synthetic construct
  source 1..20: mol_type = other DNA
agacggggtgactgcagtgg

SEQ ID NO: 298553 - DNA, 20 bp, synthetic construct
  source 1..20: mol_type = other DNA
cagacggggtgactgcagtg

SEQ ID NO: 298554 - DNA, 20 bp, synthetic construct
  source 1..20: mol_type = other DNA
gcagacggggtgactgcagt

SEQ ID NO: 298555 - DNA, 20 bp, synthetic construct
  source 1..20: mol_type = other DNA
cgcagacggggtgactgcag

SEQ ID NO: 298556 - DNA, 20 bp, synthetic construct
  source 1..20: mol_type = other DNA
gcgcagacggggtgactgca

SEQ ID NO: 298557 - DNA, 20 bp, synthetic construct
  source 1..20: mol_type = other DNA
ggcgcagacggggtgactgc

SEQ ID NO: 298558 - DNA, 20 bp, synthetic construct
  source 1..20: mol_type = other DNA
cggcgcagacggggtgactg

SEQ ID NO: 298559 - DNA, 20 bp, synthetic construct
  source 1..20: mol_type = other DNA
gcggcgcagacggggtgact

SEQ ID NO: 298560 - DNA, 20 bp, synthetic construct
  source 1..20: mol_type = other DNA
agcggcgcagacggggtgac

SEQ ID NO: 298561 - DNA, 20 bp, synthetic construct
  source 1..20: mol_type = other DNA
cagcggcgcagacggggtga

SEQ ID NO: 298562 - DNA, 20 bp, synthetic construct
  source 1..20: mol_type = other DNA
acagcggcgcagacggggtg

SEQ ID NO: 298563 - DNA, 20 bp, synthetic construct
  source 1..20: mol_type = other DNA
cacagcggcgcagacggggt

SEQ ID NO: 298564 - DNA, 20 bp, synthetic construct
  source 1..20: mol_type = other DNA
gcacagcggcgcagacgggg

SEQ ID NO: 298565 - DNA, 20 bp, synthetic construct
  source 1..20: mol_type = other DNA
agcacagcggcgcagacggg

SEQ ID NO: 298566 - DNA, 20 bp, synthetic construct
  source 1..20: mol_type = other DNA
cagcacagcggcgcagacgg

SEQ ID NO: 298567 - DNA, 20 bp, synthetic construct
  source 1..20: mol_type = other DNA
acagcacagcggcgcagacg

SEQ ID NO: 298568 - DNA, 20 bp, synthetic construct
  source 1..20: mol_type = other DNA
aacagcacagcggcgcagac

SEQ ID NO: 298569 - DNA, 20 bp, synthetic construct
  source 1..20: mol_type = other DNA
caacagcacagcggcgcaga

SEQ ID NO: 298570 - DNA, 20 bp, synthetic construct
  source 1..20: mol_type = other DNA
acaacagcacagcggcgcag

SEQ ID NO: 298571 - DNA, 20 bp, synthetic construct
  source 1..20: mol_type = other DNA
gacaacagcacagcggcgca

SEQ ID NO: 298572 - DNA, 20 bp, synthetic construct
  source 1..20: mol_type = other DNA
agacaacagcacagcggcgc

SEQ ID NO: 298573 - DNA, 20 bp, synthetic construct
  source 1..20: mol_type = other DNA
cagacaacagcacagcggcg

SEQ ID NO: 298574 - DNA, 20 bp, synthetic construct
  source 1..20: mol_type = other DNA
gcagacaacagcacagcggc

SEQ ID NO: 298575 - DNA, 20 bp, synthetic construct
  source 1..20: mol_type = other DNA
ggcagacaacagcacagcgg

SEQ ID NO: 298576 - DNA, 20 bp, synthetic construct
  source 1..20: mol_type = other DNA
cggcagacaacagcacagcg

SEQ ID NO: 298577 - DNA, 20 bp, synthetic construct
  source 1..20: mol_type = other DNA
acggcagacaacagcacagc

SEQ ID NO: 298578 - DNA, 20 bp, synthetic construct
  source 1..20: mol_type = other DNA
cacggcagacaacagcacag

SEQ ID NO: 298579 - DNA, 20 bp, synthetic construct
  source 1..20: mol_type = other DNA
tcacggcagacaacagcaca

SEQ ID NO: 298580 - DNA, 20 bp, synthetic construct
  source 1..20: mol_type = other DNA
ctcacggcagacaacagcac

SEQ ID NO: 298581 - DNA, 20 bp, synthetic construct
  source 1..20: mol_type = other DNA
tctcacggcagacaacagca

SEQ ID NO: 298582 - DNA, 20 bp, synthetic construct
  source 1..20: mol_type = other DNA
ctctcacggcagacaacagc

SEQ ID NO: 298583 - DNA, 20 bp, synthetic construct
  source 1..20: mol_type = other DNA
gctctcacggcagacaacag

SEQ ID NO: 298584 - DNA, 20 bp, synthetic construct
  source 1..20: mol_type = other DNA
ggctctcacggcagacaaca

SEQ ID NO: 298585 - DNA, 20 bp, synthetic construct
  source 1..20: mol_type = other DNA
gggctctcacggcagacaac

SEQ ID NO: 298586 - DNA, 20 bp, synthetic construct
  source 1..20: mol_type = other DNA
tgggctctcacggcagacaa

SEQ ID NO: 298587 - DNA, 20 bp, synthetic construct
  source 1..20: mol_type = other DNA
ttgggctctcacggcagaca

SEQ ID NO: 298588 - DNA, 20 bp, synthetic construct
  source 1..20: mol_type = other DNA
attgggctctcacggcagac

SEQ ID NO: 298589 - DNA, 20 bp, synthetic construct
  source 1..20: mol_type = other DNA
gattgggctctcacggcaga

SEQ ID NO: 298590 - DNA, 20 bp, synthetic construct
  source 1..20: mol_type = other DNA
tgattgggctctcacggcag

SEQ ID NO: 298591 - DNA, 20 bp, synthetic construct
  source 1..20: mol_type = other DNA
gtgattgggctctcacggca

SEQ ID NO: 298592 - DNA, 20 bp, synthetic construct
  source 1..20: mol_type = other DNA
agtgattgggctctcacggc

SEQ ID NO: 298593 - DNA, 20 bp, synthetic construct
  source 1..20: mol_type = other DNA
cagtgattgggctctcacgg

SEQ ID NO: 298594 - DNA, 20 bp, synthetic construct
  source 1..20: mol_type = other DNA
gcagtgattgggctctcacg

SEQ ID NO: 298595 - DNA, 20 bp, synthetic construct
  source 1..20: mol_type = other DNA
ggcagtgattgggctctcac

SEQ ID NO: 298596 - DNA, 20 bp, synthetic construct
  source 1..20: mol_type = other DNA
aggcagtgattgggctctca

SEQ ID NO: 298597 - DNA, 20 bp, synthetic construct
  source 1..20: mol_type = other DNA
taggcagtgattgggctctc

SEQ ID NO: 298598 - DNA, 20 bp, synthetic construct
  source 1..20: mol_type = other DNA
ataggcagtgattgggctct

SEQ ID NO: 298599 - DNA, 20 bp, synthetic construct
  source 1..20: mol_type = other DNA
tataggcagtgattgggctc

SEQ ID NO: 298600 - DNA, 20 bp, synthetic construct
  source 1..20: mol_type = other DNA
gtataggcagtgattgggct

SEQ ID NO: 298601 - DNA, 20 bp, synthetic construct
  source 1..20: mol_type = other DNA
ggtataggcagtgattgggc

SEQ ID NO: 298602 - DNA, 20 bp, synthetic construct
  source 1..20: mol_type = other DNA
gggtataggcagtgattggg

SEQ ID NO: 298603 - DNA, 20 bp, synthetic construct
  source 1..20: mol_type = other DNA
ggggtataggcagtgattgg

SEQ ID NO: 298604 - DNA, 20 bp, synthetic construct
  source 1..20: mol_type = other DNA
aggggtataggcagtgattg

SEQ ID NO: 298605 - DNA, 20 bp, synthetic construct
  source 1..20: mol_type = other DNA
gaggggtataggcagtgatt

SEQ ID NO: 298606 - DNA, 20 bp, synthetic construct
  source 1..20: mol_type = other DNA
tgaggggtataggcagtgat

SEQ ID NO: 298607 - DNA, 20 bp, synthetic construct
  source 1..20: mol_type = other DNA
atgaggggtataggcagtga

SEQ ID NO: 298608 - DNA, 20 bp, synthetic construct
  source 1..20: mol_type = other DNA
gatgaggggtataggcagtg

SEQ ID NO: 298609 - DNA, 20 bp, synthetic construct
  source 1..20: mol_type = other DNA
tgatgaggggtataggcagt

SEQ ID NO: 298610 - DNA, 20 bp, synthetic construct
  source 1..20: mol_type = other DNA
gtgatgaggggtataggcag

SEQ ID NO: 298611 - DNA, 20 bp, synthetic construct
  source 1..20: mol_type = other DNA
tgtgatgaggggtataggca

SEQ ID NO: 298612 - DNA, 20 bp, synthetic construct
  source 1..20: mol_type = other DNA
gtgtgatgaggggtataggc

SEQ ID NO: 298613 - DNA, 20 bp, synthetic construct
  source 1..20: mol_type = other DNA
cgtgtgatgaggggtatagg

SEQ ID NO: 298614 - DNA, 20 bp, synthetic construct
  source 1..20: mol_type = other DNA
acgtgtgatgaggggtatag

SEQ ID NO: 298615 - DNA, 20 bp, synthetic construct
  source 1..20: mol_type = other DNA
gacgtgtgatgaggggtata

SEQ ID NO: 298616 - DNA, 20 bp, synthetic construct
  source 1..20: mol_type = other DNA
tgacgtgtgatgaggggtat

SEQ ID NO: 298617 - DNA, 20 bp, synthetic construct
  source 1..20: mol_type = other DNA
gtgacgtgtgatgaggggta

SEQ ID NO: 298618 - DNA, 20 bp, synthetic construct
  source 1..20: mol_type = other DNA
tgtgacgtgtgatgaggggt

SEQ ID NO: 298619 - DNA, 20 bp, synthetic construct
  source 1..20: mol_type = other DNA
ttgtgacgtgtgatgagggg

SEQ ID NO: 298620 - DNA, 20 bp, synthetic construct
  source 1..20: mol_type = other DNA
attgtgacgtgtgatgaggg

SEQ ID NO: 298621 - DNA, 20 bp, synthetic construct
  source 1..20: mol_type = other DNA
cattgtgacgtgtgatgagg

SEQ ID NO: 298622 - DNA, 20 bp, synthetic construct
  source 1..20: mol_type = other DNA
acattgtgacgtgtgatgag

SEQ ID NO: 298623 - DNA, 20 bp, synthetic construct
  source 1..20: mol_type = other DNA
gacattgtgacgtgtgatga

SEQ ID NO: 298624 - DNA, 20 bp, synthetic construct
  source 1..20: mol_type = other DNA
ggacattgtgacgtgtgatg

SEQ ID NO: 298625 - DNA, 20 bp, synthetic construct
  source 1..20: mol_type = other DNA
gggacattgtgacgtgtgat

SEQ ID NO: 298626 - DNA, 20 bp, synthetic construct
  source 1..20: mol_type = other DNA
cgggacattgtgacgtgtga

SEQ ID NO: 298627 - DNA, 20 bp, synthetic construct
  source 1..20: mol_type = other DNA
tcgggacattgtgacgtgtg

SEQ ID NO: 298628 - DNA, 20 bp, synthetic construct
  source 1..20: mol_type = other DNA
ttcgggacattgtgacgtgt

SEQ ID NO: 298629 - DNA, 20 bp, synthetic construct
  source 1..20: mol_type = other DNA
attcgggacattgtgacgtg

SEQ ID NO: 298630 - DNA, 20 bp, synthetic construct
  source 1..20: mol_type = other DNA
aattcgggacattgtgacgt

SEQ ID NO: 298631 - DNA, 20 bp, synthetic construct
  source 1..20: mol_type = other DNA
gaattcgggacattgtgacg

SEQ ID NO: 298632 - DNA, 20 bp, synthetic construct
  source 1..20: mol_type = other DNA
ggaattcgggacattgtgac

SEQ ID NO: 298633 - DNA, 20 bp, synthetic construct
  source 1..20: mol_type = other DNA
gggaattcgggacattgtga

SEQ ID NO: 298634 - DNA, 20 bp, synthetic construct
  source 1..20: mol_type = other DNA
tgggaattcgggacattgtg

SEQ ID NO: 298635 - DNA, 20 bp, synthetic construct
  source 1..20: mol_type = other DNA
ctgggaattcgggacattgt

SEQ ID NO: 298636 - DNA, 20 bp, synthetic construct
  source 1..20: mol_type = other DNA
gctgggaattcgggacattg

SEQ ID NO: 298637 - DNA, 20 bp, synthetic construct
  source 1..20: mol_type = other DNA
ggctgggaattcgggacatt

SEQ ID NO: 298638 - DNA, 20 bp, synthetic construct
  source 1..20: mol_type = other DNA
aggctgggaattcgggacat

SEQ ID NO: 298639 - DNA, 20 bp, synthetic construct
  source 1..20: mol_type = other DNA
gaggctgggaattcgggaca

SEQ ID NO: 298640 - DNA, 20 bp, synthetic construct
  source 1..20: mol_type = other DNA
tgaggctgggaattcgggac

SEQ ID NO: 298641 - DNA, 20 bp, synthetic construct
  source 1..20: mol_type = other DNA
gtgaggctgggaattcggga

SEQ ID NO: 298642 - DNA, 20 bp, synthetic construct
  source 1..20: mol_type = other DNA
ggtgaggctgggaattcggg

SEQ ID NO: 298643 - DNA, 20 bp, synthetic construct
  source 1..20: mol_type = other DNA
tggtgaggctgggaattcgg

SEQ ID NO: 298644 - DNA, 20 bp, synthetic construct
  source 1..20: mol_type = other DNA
gtggtgaggctgggaattcg

SEQ ID NO: 298645 - DNA, 20 bp, synthetic construct
  source 1..20: mol_type = other DNA
ggtggtgaggctgggaattc

SEQ ID NO: 298646 - DNA, 20 bp, synthetic construct
  source 1..20: mol_type = other DNA
gggtggtgaggctgggaatt

SEQ ID NO: 298647 - DNA, 20 bp, synthetic construct
  source 1..20: mol_type = other DNA
ggggtggtgaggctgggaat

SEQ ID NO: 298648 - DNA, 20 bp, synthetic construct
  source 1..20: mol_type = other DNA
aggggtggtgaggctgggaa

SEQ ID NO: 298649 - DNA, 20 bp, synthetic construct
  source 1..20: mol_type = other DNA
aaggggtggtgaggctggga

SEQ ID NO: 298650 - DNA, 20 bp, synthetic construct
  source 1..20: mol_type = other DNA
gaaggggtggtgaggctggg

SEQ ID NO: 298651 - DNA, 20 bp, synthetic construct
  source 1..20: mol_type = other DNA
agaaggggtggtgaggctgg

SEQ ID NO: 298652 - DNA, 20 bp, synthetic construct
  source 1..20: mol_type = other DNA
gagaaggggtggtgaggctg

SEQ ID NO: 298653 - DNA, 20 bp, synthetic construct
  source 1..20: mol_type = other DNA
tgagaaggggtggtgaggct

SEQ ID NO: 298654 - DNA, 20 bp, synthetic construct
  source 1..20: mol_type = other DNA
ctgagaaggggtggtgaggc

SEQ ID NO: 298655 - DNA, 20 bp, synthetic construct
  source 1..20: mol_type = other DNA
actgagaaggggtggtgagg

SEQ ID NO: 298656 - DNA, 20 bp, synthetic construct
  source 1..20: mol_type = other DNA
tactgagaaggggtggtgag

SEQ ID NO: 298657 - DNA, 20 bp, synthetic construct
  source 1..20: mol_type = other DNA
ttactgagaaggggtggtga

SEQ ID NO: 298658 - DNA, 20 bp, synthetic construct
  source 1..20: mol_type = other DNA
attactgagaaggggtggtg

SEQ ID NO: 298659 - DNA, 20 bp, synthetic construct
  source 1..20: mol_type = other DNA
cattactgagaaggggtggt

SEQ ID NO: 298660 - DNA, 20 bp, synthetic construct
  source 1..20: mol_type = other DNA
tcattactgagaaggggtgg

SEQ ID NO: 298661 - DNA, 20 bp, synthetic construct
  source 1..20: mol_type = other DNA
gtcattactgagaaggggtg

SEQ ID NO: 298662 - DNA, 20 bp, synthetic construct
  source 1..20: mol_type = other DNA
ggtcattactgagaaggggt

SEQ ID NO: 298663 - DNA, 20 bp, synthetic construct
  source 1..20: mol_type = other DNA
gggtcattactgagaagggg

SEQ ID NO: 298664 - DNA, 20 bp, synthetic construct
  source 1..20: mol_type = other DNA
agggtcattactgagaaggg

SEQ ID NO: 298665 - DNA, 20 bp, synthetic construct
  source 1..20: mol_type = other DNA
cagggtcattactgagaagg

SEQ ID NO: 298666 - DNA, 20 bp, synthetic construct
  source 1..20: mol_type = other DNA
ccagggtcattactgagaag

SEQ ID NO: 298667 - DNA, 20 bp, synthetic construct
  source 1..20: mol_type = other DNA
accagggtcattactgagaa

SEQ ID NO: 298668 - DNA, 20 bp, synthetic construct
  source 1..20: mol_type = other DNA
aaccagggtcattactgaga

SEQ ID NO: 298669 - DNA, 20 bp, synthetic construct
  source 1..20: mol_type = other DNA
caaccagggtcattactgag

SEQ ID NO: 298670 - DNA, 20 bp, synthetic construct
  source 1..20: mol_type = other DNA
ccaaccagggtcattactga

SEQ ID NO: 298671 - DNA, 20 bp, synthetic construct
  source 1..20: mol_type = other DNA
accaaccagggtcattactg

SEQ ID NO: 298672 - DNA, 20 bp, synthetic construct
  source 1..20: mol_type = other DNA
aaccaaccagggtcattact

SEQ ID NO: 298673 - DNA, 20 bp, synthetic construct
  source 1..20: mol_type = other DNA
caaccaaccagggtcattac

SEQ ID NO: 298674 - DNA, 20 bp, synthetic construct
  source 1..20: mol_type = other DNA
gcaaccaaccagggtcatta

SEQ ID NO: 298675 - DNA, 20 bp, synthetic construct
  source 1..20: mol_type = other DNA
tgcaaccaaccagggtcatt

SEQ ID NO: 298676 - DNA, 20 bp, synthetic construct
  source 1..20: mol_type = other DNA
ctgcaaccaaccagggtcat

SEQ ID NO: 298677 - DNA, 20 bp, synthetic construct
  source 1..20: mol_type = other DNA
cctgcaaccaaccagggtca

SEQ ID NO: 298678 - DNA, 20 bp, synthetic construct
  source 1..20: mol_type = other DNA
tcctgcaaccaaccagggtc

SEQ ID NO: 298679 - DNA, 20 bp, synthetic construct
  source 1..20: mol_type = other DNA
ctcctgcaaccaaccagggt

SEQ ID NO: 298680 - DNA, 20 bp, synthetic construct
  source 1..20: mol_type = other DNA
cctcctgcaaccaaccaggg

SEQ ID NO: 298681 - DNA, 20 bp, synthetic construct
  source 1..20: mol_type = other DNA
acctcctgcaaccaaccagg

SEQ ID NO: 298682 - DNA, 20 bp, synthetic construct
  source 1..20: mol_type = other DNA
tacctcctgcaaccaaccag

SEQ ID NO: 298683 - DNA, 20 bp, synthetic construct
  source 1..20: mol_type = other DNA
gtacctcctgcaaccaacca

SEQ ID NO: 298684 - DNA, 20 bp, synthetic construct
  source 1..20: mol_type = other DNA
ggtacctcctgcaaccaacc

SEQ ID NO: 298685 - DNA, 20 bp, synthetic construct
  source 1..20: mol_type = other DNA
aggtacctcctgcaaccaac

SEQ ID NO: 298686 - DNA, 20 bp, synthetic construct
  source 1..20: mol_type = other DNA
taggtacctcctgcaaccaa

SEQ ID NO: 298687 - DNA, 20 bp, synthetic construct
  source 1..20: mol_type = other DNA
gtaggtacctcctgcaacca

SEQ ID NO: 298688 - DNA, 20 bp, synthetic construct
  source 1..20: mol_type = other DNA
agtaggtacctcctgcaacc

SEQ ID NO: 298689 - DNA, 20 bp, synthetic construct
  source 1..20: mol_type = other DNA
gagtaggtacctcctgcaac

SEQ ID NO: 298690 - DNA, 20 bp, synthetic construct
  source 1..20: mol_type = other DNA
ggagtaggtacctcctgcaa

SEQ ID NO: 298691 - DNA, 20 bp, synthetic construct
  source 1..20: mol_type = other DNA
tggagtaggtacctcctgca

SEQ ID NO: 298692 - DNA, 20 bp, synthetic construct
  source 1..20: mol_type = other DNA
atggagtaggtacctcctgc

SEQ ID NO: 298693 - DNA, 20 bp, synthetic construct
  source 1..20: mol_type = other DNA
tatggagtaggtacctcctg

SEQ ID NO: 298694 - DNA, 20 bp, synthetic construct
  source 1..20: mol_type = other DNA
gtatggagtaggtacctcct

SEQ ID NO: 298695 - DNA, 20 bp, synthetic construct
  source 1..20: mol_type = other DNA
agtatggagtaggtacctcc

SEQ ID NO: 298696 - DNA, 20 bp, synthetic construct
  source 1..20: mol_type = other DNA
cagtatggagtaggtacctc

SEQ ID NO: 298697 - DNA, 20 bp, synthetic construct
  source 1..20: mol_type = other DNA
tcagtatggagtaggtacct

SEQ ID NO: 298698 - DNA, 20 bp, synthetic construct
  source 1..20: mol_type = other DNA
ctcagtatggagtaggtacc

SEQ ID NO: 298699 - DNA, 20 bp, synthetic construct
  source 1..20: mol_type = other DNA
cctcagtatggagtaggtac

SEQ ID NO: 298700 - DNA, 20 bp, synthetic construct
  source 1..20: mol_type = other DNA
ccctcagtatggagtaggta

SEQ ID NO: 298701 - DNA, 20 bp, synthetic construct
  source 1..20: mol_type = other DNA
accctcagtatggagtaggt

SEQ ID NO: 298702 - DNA, 20 bp, synthetic construct
  source 1..20: mol_type = other DNA
caccctcagtatggagtagg

SEQ ID NO: 298703 - DNA, 20 bp, synthetic construct
  source 1..20: mol_type = other DNA
tcaccctcagtatggagtag

SEQ ID NO: 298704 - DNA, 20 bp, synthetic construct
  source 1..20: mol_type = other DNA
ttcaccctcagtatggagta

SEQ ID NO: 298705 - DNA, 20 bp, synthetic construct
  source 1..20: mol_type = other DNA
tttcaccctcagtatggagt

SEQ ID NO: 298706 - DNA, 20 bp, synthetic construct
  source 1..20: mol_type = other DNA
atttcaccctcagtatggag

SEQ ID NO: 298707 - DNA, 20 bp, synthetic construct
  source 1..20: mol_type = other DNA
aatttcaccctcagtatgga

SEQ ID NO: 298708 - DNA, 20 bp, synthetic construct
  source 1..20: mol_type = other DNA
taatttcaccctcagtatgg

SEQ ID NO: 298709 - DNA, 20 bp, synthetic construct
  source 1..20: mol_type = other DNA
ttaatttcaccctcagtatg

SEQ ID NO: 298710 - DNA, 20 bp, synthetic construct
  source 1..20: mol_type = other DNA
cttaatttcaccctcagtat

SEQ ID NO: 298711 - DNA, 20 bp, synthetic construct
  source 1..20: mol_type = other DNA
ccttaatttcaccctcagta

SEQ ID NO: 298712 - DNA, 20 bp, synthetic construct
  source 1..20: mol_type = other DNA
cccttaatttcaccctcagt

SEQ ID NO: 298713 - DNA, 20 bp, synthetic construct
  source 1..20: mol_type = other DNA
tcccttaatttcaccctcag

SEQ ID NO: 298714 - DNA, 20 bp, synthetic construct
  source 1..20: mol_type = other DNA
ttcccttaatttcaccctca

SEQ ID NO: 298715 - DNA, 20 bp, synthetic construct
  source 1..20: mol_type = other DNA
cttcccttaatttcaccctc

SEQ ID NO: 298716 - DNA, 20 bp, synthetic construct
  source 1..20: mol_type = other DNA
ccttcccttaatttcaccct

SEQ ID NO: 298717 - DNA, 20 bp, synthetic construct
  source 1..20: mol_type = other DNA
gccttcccttaatttcaccc

SEQ ID NO: 298718 - DNA, 20 bp, synthetic construct
  source 1..20: mol_type = other DNA
tgccttcccttaatttcacc

SEQ ID NO: 298719 - DNA, 20 bp, synthetic construct
  source 1..20: mol_type = other DNA
ttgccttcccttaatttcac

SEQ ID NO: 298720 - DNA, 20 bp, synthetic construct
  source 1..20: mol_type = other DNA
tttgccttcccttaatttca

SEQ ID NO: 298721 - DNA, 20 bp, synthetic construct
  source 1..20: mol_type = other DNA
ctttgccttcccttaatttc

SEQ ID NO: 298722 - DNA, 20 bp, synthetic construct
  source 1..20: mol_type = other DNA
actttgccttcccttaattt

SEQ ID NO: 298723 - DNA, 20 bp, synthetic construct
  source 1..20: mol_type = other DNA
gactttgccttcccttaatt

SEQ ID NO: 298724 - DNA, 20 bp, synthetic construct
  source 1..20: mol_type = other DNA
ggactttgccttcccttaat

SEQ ID NO: 298725 - DNA, 20 bp, synthetic construct
  source 1..20: mol_type = other DNA
tggactttgccttcccttaa

SEQ ID NO: 298726 - DNA, 20 bp, synthetic construct
  source 1..20: mol_type = other DNA
ctggactttgccttccctta

SEQ ID NO: 298727 - DNA, 20 bp, synthetic construct
  source 1..20: mol_type = other DNA
cctggactttgccttccctt

SEQ ID NO: 298728 - DNA, 20 bp, synthetic construct
  source 1..20: mol_type = other DNA
gcctggactttgccttccct

SEQ ID NO: 298729 - DNA, 20 bp, synthetic construct
  source 1..20: mol_type = other DNA
tgcctggactttgccttccc

SEQ ID NO: 298730 - DNA, 20 bp, synthetic construct
  source 1..20: mol_type = other DNA
gtgcctggactttgccttcc

SEQ ID NO: 298731 - DNA, 20 bp, synthetic construct
  source 1..20: mol_type = other DNA
tgtgcctggactttgccttc

SEQ ID NO: 298732 - DNA, 20 bp, synthetic construct
  source 1..20: mol_type = other DNA
ttgtgcctggactttgcctt

SEQ ID NO: 298733 - DNA, 20 bp, synthetic construct
  source 1..20: mol_type = other DNA
cttgtgcctggactttgcct

SEQ ID NO: 298734 - DNA, 20 bp, synthetic construct
  source 1..20: mol_type = other DNA
tcttgtgcctggactttgcc

SEQ ID NO: 298735 - DNA, 20 bp, synthetic construct
  source 1..20: mol_type = other DNA
ctcttgtgcctggactttgc

SEQ ID NO: 298736 - DNA, 20 bp, synthetic construct
  source 1..20: mol_type = other DNA
actcttgtgcctggactttg

SEQ ID NO: 298737 - DNA, 20 bp, synthetic construct
  source 1..20: mol_type = other DNA
cactcttgtgcctggacttt

SEQ ID NO: 298738 - DNA, 20 bp, synthetic construct
  source 1..20: mol_type = other DNA
ccactcttgtgcctggactt

SEQ ID NO: 298739 - DNA, 20 bp, synthetic construct
  source 1..20: mol_type = other DNA
cccactcttgtgcctggact

SEQ ID NO: 298740 - DNA, 20 bp, synthetic construct
  source 1..20: mol_type = other DNA
tcccactcttgtgcctggac

SEQ ID NO: 298741 - DNA, 20 bp, synthetic construct
  source 1..20: mol_type = other DNA
gtcccactcttgtgcctgga

SEQ ID NO: 298742 - DNA, 20 bp, synthetic construct
  source 1..20: mol_type = other DNA
ggtcccactcttgtgcctgg

SEQ ID NO: 298743 - DNA, 20 bp, synthetic construct
  source 1..20: mol_type = other DNA
gggtcccactcttgtgcctg

SEQ ID NO: 298744 - DNA, 20 bp, synthetic construct
  source 1..20: mol_type = other DNA
ggggtcccactcttgtgcct

SEQ ID NO: 298745 - DNA, 20 bp, synthetic construct
  source 1..20: mol_type = other DNA
tggggtcccactcttgtgcc

SEQ ID NO: 298746 - DNA, 20 bp, synthetic construct
  source 1..20: mol_type = other DNA
ctggggtcccactcttgtgc

SEQ ID NO: 298747 - DNA, 20 bp, synthetic construct
  source 1..20: mol_type = other DNA
gctggggtcccactcttgtg

SEQ ID NO: 298748 - DNA, 20 bp, synthetic construct
  source 1..20: mol_type = other DNA
ggctggggtcccactcttgt

SEQ ID NO: 298749 - DNA, 20 bp, synthetic construct
  source 1..20: mol_type = other DNA
aggctggggtcccactcttg

SEQ ID NO: 298750 - DNA, 20 bp, synthetic construct
  source 1..20: mol_type = other DNA
gaggctggggtcccactctt

SEQ ID NO: 298751 - DNA, 20 bp, synthetic construct
  source 1..20: mol_type = other DNA
agaggctggggtcccactct

SEQ ID NO: 298752 - DNA, 20 bp, synthetic construct
  source 1..20: mol_type = other DNA
gagaggctggggtcccactc

SEQ ID NO: 298753 - DNA, 20 bp, synthetic construct
  source 1..20: mol_type = other DNA
tgagaggctggggtcccact

SEQ ID NO: 298754 - DNA, 20 bp, synthetic construct
  source 1..20: mol_type = other DNA
gtgagaggctggggtcccac

SEQ ID NO: 298755 - DNA, 20 bp, synthetic construct
  source 1..20: mol_type = other DNA
agtgagaggctggggtccca

SEQ ID NO: 298756 - DNA, 20 bp, synthetic construct
  source 1..20: mol_type = other DNA
gagtgagaggctggggtccc

SEQ ID NO: 298757 - DNA, 20 bp, synthetic construct
  source 1..20: mol_type = other DNA
agagtgagaggctggggtcc

SEQ ID NO: 298758 - DNA, 20 bp, synthetic construct
  source 1..20: mol_type = other DNA
gagagtgagaggctggggtc

SEQ ID NO: 298759 - DNA, 20 bp, synthetic construct
  source 1..20: mol_type = other DNA
tgagagtgagaggctggggt

SEQ ID NO: 298760 - DNA, 20 bp, synthetic construct
  source 1..20: mol_type = other DNA
ctgagagtgagaggctgggg

SEQ ID NO: 298761 - DNA, 20 bp, synthetic construct
  source 1..20: mol_type = other DNA
actgagagtgagaggctggg

SEQ ID NO: 298762 - DNA, 20 bp, synthetic construct
  source 1..20: mol_type = other DNA
aactgagagtgagaggctgg

SEQ ID NO: 298763 - DNA, 20 bp, synthetic construct
  source 1..20: mol_type = other DNA
gaactgagagtgagaggctg

SEQ ID NO: 298764 - DNA, 20 bp, synthetic construct
  source 1..20: mol_type = other DNA
ggaactgagagtgagaggct

SEQ ID NO: 298765 - DNA, 20 bp, synthetic construct
  source 1..20: mol_type = other DNA
tggaactgagagtgagaggc

SEQ ID NO: 298766 - DNA, 20 bp, synthetic construct
  source 1..20: mol_type = other DNA
gtggaactgagagtgagagg

SEQ ID NO: 298767 - DNA, 20 bp, synthetic construct
  source 1..20: mol_type = other DNA
agtggaactgagagtgagag

SEQ ID NO: 298768 - DNA, 20 bp, synthetic construct
  source 1..20: mol_type = other DNA
gagtggaactgagagtgaga

SEQ ID NO: 298769 - DNA, 20 bp, synthetic construct
  source 1..20: mol_type = other DNA
tgagtggaactgagagtgag

SEQ ID NO: 298770 - DNA, 20 bp, synthetic construct
  source 1..20: mol_type = other DNA
atgagtggaactgagagtga

SEQ ID NO: 298771 - DNA, 20 bp, synthetic construct
  source 1..20: mol_type = other DNA
gatgagtggaactgagagtg

SEQ ID NO: 298772 - DNA, 20 bp, synthetic construct
  source 1..20: mol_type = other DNA
ggatgagtggaactgagagt

SEQ ID NO: 298773 - DNA, 20 bp, synthetic construct
  source 1..20: mol_type = other DNA
tggatgagtggaactgagag

SEQ ID NO: 298774 - DNA, 20 bp, synthetic construct
  source 1..20: mol_type = other DNA
ttggatgagtggaactgaga

SEQ ID NO: 298775 - DNA, 20 bp, synthetic construct
  source 1..20: mol_type = other DNA
gttggatgagtggaactgag

SEQ ID NO: 298776 - DNA, 20 bp, synthetic construct
  source 1..20: mol_type = other DNA
agttggatgagtggaactga

SEQ ID NO: 298777 - DNA, 20 bp, synthetic construct
  source 1..20: mol_type = other DNA
cagttggatgagtggaactg

SEQ ID NO: 298778 - DNA, 20 bp, synthetic construct
  source 1..20: mol_type = other DNA
ccagttggatgagtggaact

SEQ ID NO: 298779 - DNA, 20 bp, synthetic construct
  source 1..20: mol_type = other DNA
cccagttggatgagtggaac

SEQ ID NO: 298780 - DNA, 20 bp, synthetic construct
  source 1..20: mol_type = other DNA
tcccagttggatgagtggaa

SEQ ID NO: 298781 - DNA, 20 bp, synthetic construct
  source 1..20: mol_type = other DNA
gtcccagttggatgagtgga

SEQ ID NO: 298782 - DNA, 20 bp, synthetic construct
  source 1..20: mol_type = other DNA
ggtcccagttggatgagtgg

SEQ ID NO: 298783 - DNA, 20 bp, synthetic construct
  source 1..20: mol_type = other DNA
gggtcccagttggatgagtg

SEQ ID NO: 298784 - DNA, 20 bp, synthetic construct
  source 1..20: mol_type = other DNA
agggtcccagttggatgagt

SEQ ID NO: 298785 - DNA, 20 bp, synthetic construct
  source 1..20: mol_type = other DNA
gagggtcccagttggatgag

SEQ ID NO: 298786 - DNA, 20 bp, synthetic construct
  source 1..20: mol_type = other DNA
tgagggtcccagttggatga

SEQ ID NO: 298787 - DNA, 20 bp, synthetic construct
  source 1..20: mol_type = other DNA
gtgagggtcccagttggatg

SEQ ID NO: 298788 - DNA, 20 bp, synthetic construct
  source 1..20: mol_type = other DNA
ggtgagggtcccagttggat

SEQ ID NO: 298789 - DNA, 20 bp, synthetic construct
  source 1..20: mol_type = other DNA
tggtgagggtcccagttgga

SEQ ID NO: 298790 - DNA, 20 bp, synthetic construct
  source 1..20: mol_type = other DNA
gtggtgagggtcccagttgg

SEQ ID NO: 298791 - DNA, 20 bp, synthetic construct
  source 1..20: mol_type = other DNA
cgtggtgagggtcccagttg

SEQ ID NO: 298792 - DNA, 20 bp, synthetic construct
  source 1..20: mol_type = other DNA
tcgtggtgagggtcccagtt

SEQ ID NO: 298793 - DNA, 20 bp, synthetic construct
  source 1..20: mol_type = other DNA
ttcgtggtgagggtcccagt

SEQ ID NO: 298794 - DNA, 20 bp, synthetic construct
  source 1..20: mol_type = other DNA
attcgtggtgagggtcccag

SEQ ID NO: 298795 - DNA, 20 bp, synthetic construct
  source 1..20: mol_type = other DNA
gattcgtggtgagggtccca

SEQ ID NO: 298796 - DNA, 20 bp, synthetic construct
  source 1..20: mol_type = other DNA
agattcgtggtgagggtccc

SEQ ID NO: 298797 - DNA, 20 bp, synthetic construct
  source 1..20: mol_type = other DNA
gagattcgtggtgagggtcc

SEQ ID NO: 298798 - DNA, 20 bp, synthetic construct
  source 1..20: mol_type = other DNA
tgagattcgtggtgagggtc

SEQ ID NO: 298799 - DNA, 20 bp, synthetic construct
  source 1..20: mol_type = other DNA
atgagattcgtggtgagggt

SEQ ID NO: 298800 - DNA, 20 bp, synthetic construct
  source 1..20: mol_type = other DNA
catgagattcgtggtgaggg

SEQ ID NO: 298801 - DNA, 20 bp, synthetic construct
  source 1..20: mol_type = other DNA
tcatgagattcgtggtgagg

SEQ ID NO: 298802 - DNA, 20 bp, synthetic construct
  source 1..20: mol_type = other DNA
atcatgagattcgtggtgag

SEQ ID NO: 298803 - DNA, 20 bp, synthetic construct
  source 1..20: mol_type = other DNA
gatcatgagattcgtggtga

SEQ ID NO: 298804 - DNA, 20 bp, synthetic construct
  source 1..20: mol_type = other DNA
agatcatgagattcgtggtg

SEQ ID NO: 298805 - DNA, 20 bp, synthetic construct
  source 1..20: mol_type = other DNA
cagatcatgagattcgtggt

SEQ ID NO: 298806 - DNA, 20 bp, synthetic construct
  source 1..20: mol_type = other DNA
tcagatcatgagattcgtgg

SEQ ID NO: 298807 - DNA, 20 bp, synthetic construct
  source 1..20: mol_type = other DNA
atcagatcatgagattcgtg

SEQ ID NO: 298808 - DNA, 20 bp, synthetic construct
  source 1..20: mol_type = other DNA
aatcagatcatgagattcgt

SEQ ID NO: 298809 - DNA, 20 bp, synthetic construct
  source 1..20: mol_type = other DNA
gaatcagatcatgagattcg

SEQ ID NO: 298810 - DNA, 20 bp, synthetic construct
  source 1..20: mol_type = other DNA
cgaatcagatcatgagattc

SEQ ID NO: 298811 - DNA, 20 bp, synthetic construct
  source 1..20: mol_type = other DNA
ccgaatcagatcatgagatt

SEQ ID NO: 298812 - DNA, 20 bp, synthetic construct
  source 1..20: mol_type = other DNA
accgaatcagatcatgagat

SEQ ID NO: 298813 - DNA, 20 bp, synthetic construct
  source 1..20: mol_type = other DNA
aaccgaatcagatcatgaga

SEQ ID NO: 298814 - DNA, 20 bp, synthetic construct
  source 1..20: mol_type = other DNA
gaaccgaatcagatcatgag

SEQ ID NO: 298815 - DNA, 20 bp, synthetic construct
  source 1..20: mol_type = other DNA
ggaaccgaatcagatcatga

SEQ ID NO: 298816 - DNA, 20 bp, synthetic construct
  source 1..20: mol_type = other DNA
gggaaccgaatcagatcatg

SEQ ID NO: 298817 - DNA, 20 bp, synthetic construct
  source 1..20: mol_type = other DNA
agggaaccgaatcagatcat

SEQ ID NO: 298818 - DNA, 20 bp, synthetic construct
  source 1..20: mol_type = other DNA
cagggaaccgaatcagatca

SEQ ID NO: 298819 - DNA, 20 bp, synthetic construct
  source 1..20: mol_type = other DNA
acagggaaccgaatcagatc

SEQ ID NO: 298820 - DNA, 20 bp, synthetic construct
  source 1..20: mol_type = other DNA
gacagggaaccgaatcagat

SEQ ID NO: 298821 - DNA, 20 bp, synthetic construct
  source 1..20: mol_type = other DNA
agacagggaaccgaatcaga

SEQ ID NO: 298822 - DNA, 20 bp, synthetic construct
  source 1..20: mol_type = other DNA
gagacagggaaccgaatcag

SEQ ID NO: 298823 - DNA, 20 bp, synthetic construct
  source 1..20: mol_type = other DNA
ggagacagggaaccgaatca

SEQ ID NO: 298824 - DNA, 20 bp, synthetic construct
  source 1..20: mol_type = other DNA
aggagacagggaaccgaatc

SEQ ID NO: 298825 - DNA, 20 bp, synthetic construct
  source 1..20: mol_type = other DNA
gaggagacagggaaccgaat

SEQ ID NO: 298826 - DNA, 20 bp, synthetic construct
  source 1..20: mol_type = other DNA
ggaggagacagggaaccgaa

SEQ ID NO: 298827 - DNA, 20 bp, synthetic construct
  source 1..20: mol_type = other DNA
aggaggagacagggaaccga

SEQ ID NO: 298828 - DNA, 20 bp, synthetic construct
  source 1..20: mol_type = other DNA
gaggaggagacagggaaccg

SEQ ID NO: 298829 - DNA, 20 bp, synthetic construct
  source 1..20: mol_type = other DNA
ggaggaggagacagggaacc

SEQ ID NO: 298830 - DNA, 20 bp, synthetic construct
  source 1..20: mol_type = other DNA
gggaggaggagacagggaac

SEQ ID NO: 298831 - DNA, 20 bp, synthetic construct
  source 1..20: mol_type = other DNA
cgggaggaggagacagggaa

SEQ ID NO: 298832 - DNA, 20 bp, synthetic construct
  source 1..20: mol_type = other DNA
acgggaggaggagacaggga

SEQ ID NO: 298833 - DNA, 20 bp, synthetic construct
  source 1..20: mol_type = other DNA
gacgggaggaggagacaggg

SEQ ID NO: 298834 - DNA, 20 bp, synthetic construct
  source 1..20: mol_type = other DNA
tgacgggaggaggagacagg

SEQ ID NO: 298835 - DNA, 20 bp, synthetic construct
  source 1..20: mol_type = other DNA
gtgacgggaggaggagacag

SEQ ID NO: 298836 - DNA, 20 bp, synthetic construct
  source 1..20: mol_type = other DNA
tgtgacgggaggaggagaca

SEQ ID NO: 298837 - DNA, 20 bp, synthetic construct
  source 1..20: mol_type = other DNA
ctgtgacgggaggaggagac

SEQ ID NO: 298838 - DNA, 20 bp, synthetic construct
  source 1..20: mol_type = other DNA
tctgtgacgggaggaggaga

SEQ ID NO: 298839 - DNA, 20 bp, synthetic construct
  source 1..20: mol_type = other DNA
atctgtgacgggaggaggag

SEQ ID NO: 298840 - DNA, 20 bp, synthetic construct
  source 1..20: mol_type = other DNA
catctgtgacgggaggagga

SEQ ID NO: 298841 - DNA, 20 bp, synthetic construct
  source 1..20: mol_type = other DNA
acatctgtgacgggaggagg

SEQ ID NO: 298842 - DNA, 20 bp, synthetic construct
  source 1..20: mol_type = other DNA
cacatctgtgacgggaggag

SEQ ID NO: 298843 - DNA, 20 bp, synthetic construct
  source 1..20: mol_type = other DNA
tcacatctgtgacgggagga

SEQ ID NO: 298844 - DNA, 20 bp, synthetic construct
  source 1..20: mol_type = other DNA
ctcacatctgtgacgggagg

SEQ ID NO: 298845 - DNA, 20 bp, synthetic construct
  source 1..20: mol_type = other DNA
gctcacatctgtgacgggag

SEQ ID NO: 298846 - DNA, 20 bp, synthetic construct
  source 1..20: mol_type = other DNA
ggctcacatctgtgacggga

SEQ ID NO: 298847 - DNA, 20 bp, synthetic construct
  source 1..20: mol_type = other DNA
tggctcacatctgtgacggg

SEQ ID NO: 298848 - DNA, 20 bp, synthetic construct
  source 1..20: mol_type = other DNA
ctggctcacatctgtgacgg

SEQ ID NO: 298849 - DNA, 20 bp, synthetic construct
  source 1..20: mol_type = other DNA
cctggctcacatctgtgacg

SEQ ID NO: 298850 - DNA, 20 bp, synthetic construct
  source 1..20: mol_type = other DNA
ccctggctcacatctgtgac

SEQ ID NO: 298851 - DNA, 20 bp, synthetic construct
  source 1..20: mol_type = other DNA
gccctggctcacatctgtga

SEQ ID NO: 298852 - DNA, 20 bp, synthetic construct
  source 1..20: mol_type = other DNA
tgccctggctcacatctgtg

SEQ ID NO: 298853 - DNA, 20 bp, synthetic construct
  source 1..20: mol_type = other DNA
gtgccctggctcacatctgt

SEQ ID NO: 298854 - DNA, 20 bp, synthetic construct
  source 1..20: mol_type = other DNA
agtgccctggctcacatctg

SEQ ID NO: 298855 - DNA, 20 bp, synthetic construct
  source 1..20: mol_type = other DNA
cagtgccctggctcacatct

SEQ ID NO: 298856 - DNA, 20 bp, synthetic construct
  source 1..20: mol_type = other DNA
gcagtgccctggctcacatc

SEQ ID NO: 298857 - DNA, 20 bp, synthetic construct
  source 1..20: mol_type = other DNA
agcagtgccctggctcacat

SEQ ID NO: 298858 - DNA, 20 bp, synthetic construct
  source 1..20: mol_type = other DNA
gagcagtgccctggctcaca

SEQ ID NO: 298859 - DNA, 20 bp, synthetic construct
  source 1..20: mol_type = other DNA
tgagcagtgccctggctcac

SEQ ID NO: 298860 - DNA, 20 bp, synthetic construct
  source 1..20: mol_type = other DNA
ctgagcagtgccctggctca

SEQ ID NO: 298861 - DNA, 20 bp, synthetic construct
  source 1..20: mol_type = other DNA
gctgagcagtgccctggctc

SEQ ID NO: 298862 - DNA, 20 bp, synthetic construct
  source 1..20: mol_type = other DNA
agctgagcagtgccctggct

SEQ ID NO: 298863 - DNA, 20 bp, synthetic construct
  source 1..20: mol_type = other DNA
cagctgagcagtgccctggc

SEQ ID NO: 298864 - DNA, 20 bp, synthetic construct
  source 1..20: mol_type = other DNA
acagctgagcagtgccctgg

SEQ ID NO: 298865 - DNA, 20 bp, synthetic construct
  source 1..20: mol_type = other DNA
cacagctgagcagtgccctg

SEQ ID NO: 298866 - DNA, 20 bp, synthetic construct
  source 1..20: mol_type = other DNA
tcacagctgagcagtgccct

SEQ ID NO: 298867 - DNA, 20 bp, synthetic construct
  source 1..20: mol_type = other DNA
gtcacagctgagcagtgccc

SEQ ID NO: 298868 - DNA, 20 bp, synthetic construct
  source 1..20: mol_type = other DNA
ggtcacagctgagcagtgcc

SEQ ID NO: 298869 - DNA, 20 bp, synthetic construct
  source 1..20: mol_type = other DNA
gggtcacagctgagcagtgc

SEQ ID NO: 298870 - DNA, 20 bp, synthetic construct
  source 1..20: mol_type = other DNA
agggtcacagctgagcagtg

SEQ ID NO: 298871 - DNA, 20 bp, synthetic construct
  source 1..20: mol_type = other DNA
tagggtcacagctgagcagt

SEQ ID NO: 298872 - DNA, 20 bp, synthetic construct
  source 1..20: mol_type = other DNA
ctagggtcacagctgagcag

SEQ ID NO: 298873 - DNA, 20 bp, synthetic construct
  source 1..20: mol_type = other DNA
cctagggtcacagctgagca

SEQ ID NO: 298874 - DNA, 20 bp, synthetic construct
  source 1..20: mol_type = other DNA
acctagggtcacagctgagc

SEQ ID NO: 298875 - DNA, 20 bp, synthetic construct
  source 1..20: mol_type = other DNA
cacctagggtcacagctgag

SEQ ID NO: 298876 - DNA, 20 bp, synthetic construct
  source 1..20: mol_type = other DNA
acacctagggtcacagctga

SEQ ID NO: 298877 - DNA, 20 bp, synthetic construct
  source 1..20: mol_type = other DNA
aacacctagggtcacagctg

SEQ ID NO: 298878 - DNA, 20 bp, synthetic construct
  source 1..20: mol_type = other DNA
aaacacctagggtcacagct

SEQ ID NO: 298879 - DNA, 20 bp, synthetic construct
  source 1..20: mol_type = other DNA
gaaacacctagggtcacagc

SEQ ID NO: 298880 - DNA, 20 bp, synthetic construct
  source 1..20: mol_type = other DNA
agaaacacctagggtcacag

SEQ ID NO: 298881 - DNA, 20 bp, synthetic construct
  source 1..20: mol_type = other DNA
cagaaacacctagggtcaca

SEQ ID NO: 298882 - DNA, 20 bp, synthetic construct
  source 1..20: mol_type = other DNA
gcagaaacacctagggtcac

SEQ ID NO: 298883 - DNA, 20 bp, synthetic construct
  source 1..20: mol_type = other DNA
ggcagaaacacctagggtca

SEQ ID NO: 298884 - DNA, 20 bp, synthetic construct
  source 1..20: mol_type = other DNA
aggcagaaacacctagggtc

SEQ ID NO: 298885 - DNA, 20 bp, synthetic construct
  source 1..20: mol_type = other DNA
aaggcagaaacacctagggt

SEQ ID NO: 298886 - DNA, 20 bp, synthetic construct
  source 1..20: mol_type = other DNA
caaggcagaaacacctaggg

SEQ ID NO: 298887 - DNA, 20 bp, synthetic construct
  source 1..20: mol_type = other DNA
acaaggcagaaacacctagg

SEQ ID NO: 298888 - DNA, 20 bp, synthetic construct
  source 1..20: mol_type = other DNA
aacaaggcagaaacacctag

SEQ ID NO: 298889 - DNA, 20 bp, synthetic construct
  source 1..20: mol_type = other DNA
caacaaggcagaaacaccta

SEQ ID NO: 298890 - DNA, 20 bp, synthetic construct
  source 1..20: mol_type = other DNA
tcaacaaggcagaaacacct

SEQ ID NO: 298891 - DNA, 20 bp, synthetic construct
  source 1..20: mol_type = other DNA
gtcaacaaggcagaaacacc

SEQ ID NO: 298892 - DNA, 20 bp, synthetic construct
  source 1..20: mol_type = other DNA
tgtcaacaaggcagaaacac

SEQ ID NO: 298893 - DNA, 20 bp, synthetic construct
  source 1..20: mol_type = other DNA
atgtcaacaaggcagaaaca

SEQ ID NO: 298894 - DNA, 20 bp, synthetic construct
  source 1..20: mol_type = other DNA
catgtcaacaaggcagaaac

SEQ ID NO: 298895 - DNA, 20 bp, synthetic construct
  source 1..20: mol_type = other DNA
ccatgtcaacaaggcagaaa

SEQ ID NO: 298896 - DNA, 20 bp, synthetic construct
  source 1..20: mol_type = other DNA
tccatgtcaacaaggcagaa

SEQ ID NO: 298897 - DNA, 20 bp, synthetic construct
  source 1..20: mol_type = other DNA
ctccatgtcaacaaggcaga

SEQ ID NO: 298898 - DNA, 20 bp, synthetic construct
  source 1..20: mol_type = other DNA
tctccatgtcaacaaggcag

SEQ ID NO: 298899 - DNA, 20 bp, synthetic construct
  source 1..20: mol_type = other DNA
ctctccatgtcaacaaggca

SEQ ID NO: 298900 - DNA, 20 bp, synthetic construct
  source 1..20: mol_type = other DNA
tctctccatgtcaacaaggc

SEQ ID NO: 298901 - DNA, 20 bp, synthetic construct
  source 1..20: mol_type = other DNA
ctctctccatgtcaacaagg

SEQ ID NO: 298902 - DNA, 20 bp, synthetic construct
  source 1..20: mol_type = other DNA
gctctctccatgtcaacaag

SEQ ID NO: 298903 - DNA, 20 bp, synthetic construct
  source 1..20: mol_type = other DNA
ggctctctccatgtcaacaa

SEQ ID NO: 298904 - DNA, 20 bp, synthetic construct
  source 1..20: mol_type = other DNA
gggctctctccatgtcaaca

SEQ ID NO: 298905 - DNA, 20 bp, synthetic construct
  source 1..20: mol_type = other DNA
agggctctctccatgtcaac

SEQ ID NO: 298906 - DNA, 20 bp, synthetic construct
  source 1..20: mol_type = other DNA
aagggctctctccatgtcaa

SEQ ID NO: 298907 - DNA, 20 bp, synthetic construct
  source 1..20: mol_type = other DNA
aaagggctctctccatgtca

SEQ ID NO: 298908 - DNA, 20 bp, synthetic construct
  source 1..20: mol_type = other DNA
gaaagggctctctccatgtc

SEQ ID NO: 298909 - DNA, 20 bp, synthetic construct
  source 1..20: mol_type = other DNA
ggaaagggctctctccatgt

SEQ ID NO: 298910 - DNA, 20 bp, synthetic construct
  source 1..20: mol_type = other DNA
gggaaagggctctctccatg

SEQ ID NO: 298911 - DNA, 20 bp, synthetic construct
  source 1..20: mol_type = other DNA
ggggaaagggctctctccat

SEQ ID NO: 298912 - DNA, 20 bp, synthetic construct
  source 1..20: mol_type = other DNA
aggggaaagggctctctcca

SEQ ID NO: 298913 - DNA, 20 bp, synthetic construct
  source 1..20: mol_type = other DNA
caggggaaagggctctctcc

SEQ ID NO: 298914 - DNA, 20 bp, synthetic construct
  source 1..20: mol_type = other DNA
tcaggggaaagggctctctc

SEQ ID NO: 298915 - DNA, 20 bp, synthetic construct
  source 1..20: mol_type = other DNA
ctcaggggaaagggctctct

SEQ ID NO: 298916 - DNA, 20 bp, synthetic construct
  source 1..20: mol_type = other DNA
tctcaggggaaagggctctc

SEQ ID NO: 298917 - DNA, 20 bp, synthetic construct
  source 1..20: mol_type = other DNA
ttctcaggggaaagggctct

SEQ ID NO: 298918 - DNA, 20 bp, synthetic construct
  source 1..20: mol_type = other DNA
cttctcaggggaaagggctc

SEQ ID NO: 298919 - DNA, 20 bp, synthetic construct
  source 1..20: mol_type = other DNA
ccttctcaggggaaagggct

SEQ ID NO: 298920 - DNA, 20 bp, synthetic construct
  source 1..20: mol_type = other DNA
gccttctcaggggaaagggc

SEQ ID NO: 298921 - DNA, 20 bp, synthetic construct
  source 1..20: mol_type = other DNA
ggccttctcaggggaaaggg

SEQ ID NO: 298922 - DNA, 20 bp, synthetic construct
  source 1..20: mol_type = other DNA
aggccttctcaggggaaagg

SEQ ID NO: 298923 - DNA, 20 bp, synthetic construct
  source 1..20: mol_type = other DNA
caggccttctcaggggaaag

SEQ ID NO: 298924 - DNA, 20 bp, synthetic construct
  source 1..20: mol_type = other DNA
ccaggccttctcaggggaaa

SEQ ID NO: 298925 - DNA, 20 bp, synthetic construct
  source 1..20: mol_type = other DNA
gccaggccttctcaggggaa

SEQ ID NO: 298926 - DNA, 20 bp, synthetic construct
  source 1..20: mol_type = other DNA
ggccaggccttctcagggga

SEQ ID NO: 298927 - DNA, 20 bp, synthetic construct
  source 1..20: mol_type = other DNA
gggccaggccttctcagggg

SEQ ID NO: 298928 - DNA, 20 bp, synthetic construct
  source 1..20: mol_type = other DNA
ggggccaggccttctcaggg

SEQ ID NO: 298929 - DNA, 20 bp, synthetic construct
  source 1..20: mol_type = other DNA
aggggccaggccttctcagg

SEQ ID NO: 298930 - DNA, 20 bp, synthetic construct
  source 1..20: mol_type = other DNA
aaggggccaggccttctcag

SEQ ID NO: 298931 - DNA, 20 bp, synthetic construct
  source 1..20: mol_type = other DNA
gaaggggccaggccttctca

SEQ ID NO: 298932 - DNA, 20 bp, synthetic construct
  source 1..20: mol_type = other DNA
ggaaggggccaggccttctc

SEQ ID NO: 298933 - DNA, 20 bp, synthetic construct
  source 1..20: mol_type = other DNA
aggaaggggccaggccttct

SEQ ID NO: 298934 - DNA, 20 bp, synthetic construct
  source 1..20: mol_type = other DNA
caggaaggggccaggccttc

SEQ ID NO: 298935 - DNA, 20 bp, synthetic construct
  source 1..20: mol_type = other DNA
acaggaaggggccaggcctt

SEQ ID NO: 298936 - DNA, 20 bp, synthetic construct
  source 1..20: mol_type = other DNA
cacaggaaggggccaggcct

SEQ ID NO: 298937 - DNA, 20 bp, synthetic construct
  source 1..20: mol_type = other DNA
gcacaggaaggggccaggcc

SEQ ID NO: 298938 - DNA, 20 bp, synthetic construct
  source 1..20: mol_type = other DNA
agcacaggaaggggccaggc

SEQ ID NO: 298939 - DNA, 20 bp, synthetic construct
  source 1..20: mol_type = other DNA
cagcacaggaaggggccagg

SEQ ID NO: 298940 - DNA, 20 bp, synthetic construct
  source 1..20: mol_type = other DNA
tcagcacaggaaggggccag

SEQ ID NO: 298941 - DNA, 20 bp, synthetic construct
  source 1..20: mol_type = other DNA
ctcagcacaggaaggggcca

SEQ ID NO: 298942 - DNA, 20 bp, synthetic construct
  source 1..20: mol_type = other DNA
gctcagcacaggaaggggcc

SEQ ID NO: 298943 - DNA, 20 bp, synthetic construct
  source 1..20: mol_type = other DNA
ggctcagcacaggaaggggc

SEQ ID NO: 298944 - DNA, 20 bp, synthetic construct
  source 1..20: mol_type = other DNA
gggctcagcacaggaagggg

SEQ ID NO: 298945 - DNA, 20 bp, synthetic construct
  source 1..20: mol_type = other DNA
tgggctcagcacaggaaggg

SEQ ID NO: 298946 - DNA, 20 bp, synthetic construct
  source 1..20: mol_type = other DNA
gtgggctcagcacaggaagg

SEQ ID NO: 298947 - DNA, 20 bp, synthetic construct
  source 1..20: mol_type = other DNA
tgtgggctcagcacaggaag

SEQ ID NO: 298948 - DNA, 20 bp, synthetic construct
  source 1..20: mol_type = other DNA
ctgtgggctcagcacaggaa

SEQ ID NO: 298949 - DNA, 20 bp, synthetic construct
  source 1..20: mol_type = other DNA
gctgtgggctcagcacagga

SEQ ID NO: 298950 - DNA, 20 bp, synthetic construct
  source 1..20: mol_type = other DNA
tgctgtgggctcagcacagg

SEQ ID NO: 298951 - DNA, 20 bp, synthetic construct
  source 1..20: mol_type = other DNA
ctgctgtgggctcagcacag

SEQ ID NO: 298952 - DNA, 20 bp, synthetic construct
  source 1..20: mol_type = other DNA
gctgctgtgggctcagcaca

SEQ ID NO: 298953 - DNA, 20 bp, synthetic construct
  source 1..20: mol_type = other DNA
tgctgctgtgggctcagcac

SEQ ID NO: 298954 - DNA, 20 bp, synthetic construct
  source 1..20: mol_type = other DNA
ctgctgctgtgggctcagca

SEQ ID NO: 298955 - DNA, 20 bp, synthetic construct
  source 1..20: mol_type = other DNA
cctgctgctgtgggctcagc

SEQ ID NO: 298956 - DNA, 20 bp, synthetic construct
  source 1..20: mol_type = other DNA
gcctgctgctgtgggctcag

SEQ ID NO: 298957 - DNA, 20 bp, synthetic construct
  source 1..20: mol_type = other DNA
agcctgctgctgtgggctca

SEQ ID NO: 298958 - DNA, 20 bp, synthetic construct
  source 1..20: mol_type = other DNA
cagcctgctgctgtgggctc

SEQ ID NO: 298959 - DNA, 20 bp, synthetic construct
  source 1..20: mol_type = other DNA
ccagcctgctgctgtgggct

SEQ ID NO: 298960 - DNA, 20 bp, synthetic construct
  source 1..20: mol_type = other DNA
cccagcctgctgctgtgggc

SEQ ID NO: 298961 - DNA, 20 bp, synthetic construct
  source 1..20: mol_type = other DNA
acccagcctgctgctgtggg

SEQ ID NO: 298962 - DNA, 20 bp, synthetic construct
  source 1..20: mol_type = other DNA
cacccagcctgctgctgtgg

SEQ ID NO: 298963 - DNA, 20 bp, synthetic construct
  source 1..20: mol_type = other DNA
acacccagcctgctgctgtg

SEQ ID NO: 298964 - DNA, 20 bp, synthetic construct
  source 1..20: mol_type = other DNA
gacacccagcctgctgctgt

SEQ ID NO: 298965 - DNA, 20 bp, synthetic construct
  source 1..20: mol_type = other DNA
agacacccagcctgctgctg

SEQ ID NO: 298966 - DNA, 20 bp, synthetic construct
  source 1..20: mol_type = other DNA
aagacacccagcctgctgct

SEQ ID NO: 298967 - DNA, 20 bp, synthetic construct
  source 1..20: mol_type = other DNA
caagacacccagcctgctgc

SEQ ID NO: 298968 - DNA, 20 bp, synthetic construct
  source 1..20: mol_type = other DNA
ccaagacacccagcctgctg

SEQ ID NO: 298969 - DNA, 20 bp, synthetic construct
  source 1..20: mol_type = other DNA
accaagacacccagcctgct

SEQ ID NO: 298970 - DNA, 20 bp, synthetic construct
  source 1..20: mol_type = other DNA
aaccaagacacccagcctgc

SEQ ID NO: 298971 - DNA, 20 bp, synthetic construct
  source 1..20: mol_type = other DNA
caaccaagacacccagcctg

SEQ ID NO: 298972 - DNA, 20 bp, synthetic construct
  source 1..20: mol_type = other DNA
acaaccaagacacccagcct

SEQ ID NO: 298973 - DNA, 20 bp, synthetic construct
  source 1..20: mol_type = other DNA
gacaaccaagacacccagcc

SEQ ID NO: 298974 - DNA, 20 bp, synthetic construct
  source 1..20: mol_type = other DNA
tgacaaccaagacacccagc

SEQ ID NO: 298975 - DNA, 20 bp, synthetic construct
  source 1..20: mol_type = other DNA
ctgacaaccaagacacccag

SEQ ID NO: 298976 - DNA, 20 bp, synthetic construct
  source 1..20: mol_type = other DNA
actgacaaccaagacaccca

SEQ ID NO: 298977 - DNA, 20 bp, synthetic construct
  source 1..20: mol_type = other DNA
cactgacaaccaagacaccc

SEQ ID NO: 298978 - DNA, 20 bp, synthetic construct
  source 1..20: mol_type = other DNA
ccactgacaaccaagacacc

SEQ ID NO: 298979 - DNA, 20 bp, synthetic construct
  source 1..20: mol_type = other DNA
accactgacaaccaagacac

SEQ ID NO: 298980 - DNA, 20 bp, synthetic construct
  source 1..20: mol_type = other DNA
caccactgacaaccaagaca

SEQ ID NO: 298981 - DNA, 20 bp, synthetic construct
  source 1..20: mol_type = other DNA
ccaccactgacaaccaagac

SEQ ID NO: 298982 - DNA, 20 bp, synthetic construct
  source 1..20: mol_type = other DNA
gccaccactgacaaccaaga

SEQ ID NO: 298983 - DNA, 20 bp, synthetic construct
  source 1..20: mol_type = other DNA
tgccaccactgacaaccaag

SEQ ID NO: 298984 - DNA, 20 bp, synthetic construct
  source 1..20: mol_type = other DNA
gtgccaccactgacaaccaa

SEQ ID NO: 298985 - DNA, 20 bp, synthetic construct
  source 1..20: mol_type = other DNA
ggtgccaccactgacaacca

SEQ ID NO: 298986 - DNA, 20 bp, synthetic construct
  source 1..20: mol_type = other DNA
tggtgccaccactgacaacc

SEQ ID NO: 298987 - DNA, 20 bp, synthetic construct
  source 1..20: mol_type = other DNA
ctggtgccaccactgacaac

SEQ ID NO: 298988 - DNA, 20 bp, synthetic construct
  source 1..20: mol_type = other DNA
cctggtgccaccactgacaa

SEQ ID NO: 298989 - DNA, 20 bp, synthetic construct
  source 1..20: mol_type = other DNA
tcctggtgccaccactgaca

SEQ ID NO: 298990 - DNA, 20 bp, synthetic construct
  source 1..20: mol_type = other DNA
atcctggtgccaccactgac

SEQ ID NO: 298991 - DNA, 20 bp, synthetic construct
  source 1..20: mol_type = other DNA
catcctggtgccaccactga

SEQ ID NO: 298992 - DNA, 20 bp, synthetic construct
  source 1..20: mol_type = other DNA
ccatcctggtgccaccactg

SEQ ID NO: 298993 - DNA, 20 bp, synthetic construct
  source 1..20: mol_type = other DNA
tccatcctggtgccaccact

SEQ ID NO: 298994 - DNA, 20 bp, synthetic construct
  source 1..20: mol_type = other DNA
ttccatcctggtgccaccac

SEQ ID NO: 298995 - DNA, 20 bp, synthetic construct
  source 1..20: mol_type = other DNA
cttccatcctggtgccacca

SEQ ID NO: 298996 - DNA, 20 bp, synthetic construct
  source 1..20: mol_type = other DNA
ccttccatcctggtgccacc

SEQ ID NO: 298997 - DNA, 20 bp, synthetic construct
  source 1..20: mol_type = other DNA
cccttccatcctggtgccac

SEQ ID NO: 298998 - DNA, 20 bp, synthetic construct
  source 1..20: mol_type = other DNA
gcccttccatcctggtgcca

SEQ ID NO: 298999 - DNA, 20 bp, synthetic construct
  source 1..20: mol_type = other DNA
tgcccttccatcctggtgcc

SEQ ID NO: 299000 - DNA, 20 bp, synthetic construct
  source 1..20: mol_type = other DNA
ttgcccttccatcctggtgc

SEQ ID NO: 299001 - DNA, 20 bp, synthetic construct
  source 1..20: mol_type = other DNA
cttgcccttccatcctggtg

SEQ ID NO: 299002 - DNA, 20 bp, synthetic construct
  source 1..20: mol_type = other DNA
ccttgcccttccatcctggt

SEQ ID NO: 299003 - DNA, 20 bp, synthetic construct
  source 1..20: mol_type = other DNA
gccttgcccttccatcctgg

SEQ ID NO: 299004 - DNA, 20 bp, synthetic construct
  source 1..20: mol_type = other DNA
tgccttgcccttccatcctg

SEQ ID NO: 299005 - DNA, 20 bp, synthetic construct
  source 1..20: mol_type = other DNA
gtgccttgcccttccatcct

SEQ ID NO: 299006 - DNA, 20 bp, synthetic construct
  source 1..20: mol_type = other DNA
ggtgccttgcccttccatcc

SEQ ID NO: 299007 - DNA, 20 bp, synthetic construct
  source 1..20: mol_type = other DNA
gggtgccttgcccttccatc

SEQ ID NO: 299008 - DNA, 20 bp, synthetic construct
  source 1..20: mol_type = other DNA
tgggtgccttgcccttccat

SEQ ID NO: 299009 - DNA, 20 bp, synthetic construct
  source 1..20: mol_type = other DNA
ctgggtgccttgcccttcca

SEQ ID NO: 299010 - DNA, 20 bp, synthetic construct
  source 1..20: mol_type = other DNA
cctgggtgccttgcccttcc

SEQ ID NO: 299011 - DNA, 20 bp, synthetic construct
  source 1..20: mol_type = other DNA
ccctgggtgccttgcccttc

SEQ ID NO: 299012 - DNA, 20 bp, synthetic construct
  source 1..20: mol_type = other DNA
gccctgggtgccttgccctt

SEQ ID NO: 299013 - DNA, 20 bp, synthetic construct
  source 1..20: mol_type = other DNA
tgccctgggtgccttgccct

SEQ ID NO: 299014 - DNA, 20 bp, synthetic construct
  source 1..20: mol_type = other DNA
ctgccctgggtgccttgccc

SEQ ID NO: 299015 - DNA, 20 bp, synthetic construct
  source 1..20: mol_type = other DNA
cctgccctgggtgccttgcc

SEQ ID NO: 299016 - DNA, 20 bp, synthetic construct
  source 1..20: mol_type = other DNA
gcctgccctgggtgccttgc

SEQ ID NO: 299017 - DNA, 20 bp, synthetic construct
  source 1..20: mol_type = other DNA
ggcctgccctgggtgccttg

SEQ ID NO: 299018 - DNA, 20 bp, synthetic construct
  source 1..20: mol_type = other DNA
gggcctgccctgggtgcctt

SEQ ID NO: 299019 - DNA, 20 bp, synthetic construct
  source 1..20: mol_type = other DNA
tgggcctgccctgggtgcct

SEQ ID NO: 299020 - DNA, 20 bp, synthetic construct
  source 1..20: mol_type = other DNA
gtgggcctgccctgggtgcc

SEQ ID NO: 299021 - DNA, 20 bp, synthetic construct
  source 1..20: mol_type = other DNA
tgtgggcctgccctgggtgc

SEQ ID NO: 299022 - DNA, 20 bp, synthetic construct
  source 1..20: mol_type = other DNA
ctgtgggcctgccctgggtg

SEQ ID NO: 299023 - DNA, 20 bp, synthetic construct
  source 1..20: mol_type = other DNA
actgtgggcctgccctgggt

SEQ ID NO: 299024 - DNA, 20 bp, synthetic construct
  source 1..20: mol_type = other DNA
gactgtgggcctgccctggg

SEQ ID NO: 299025 - DNA, 20 bp, synthetic construct
  source 1..20: mol_type = other DNA
ggactgtgggcctgccctgg

SEQ ID NO: 299026 - DNA, 20 bp, synthetic construct
  source 1..20: mol_type = other DNA
gggactgtgggcctgccctg

SEQ ID NO: 299027 - DNA, 20 bp, synthetic construct
  source 1..20: mol_type = other DNA
cgggactgtgggcctgccct

SEQ ID NO: 299028 - DNA, 20 bp, synthetic construct
  source 1..20: mol_type = other DNA
gcgggactgtgggcctgccc

SEQ ID NO: 299029 - DNA, 20 bp, synthetic construct
  source 1..20: mol_type = other DNA
agcgggactgtgggcctgcc

SEQ ID NO: 299030 - DNA, 20 bp, synthetic construct
  source 1..20: mol_type = other DNA
cagcgggactgtgggcctgc

SEQ ID NO: 299031 - DNA, 20 bp, synthetic construct
  source 1..20: mol_type = other DNA
acagcgggactgtgggcctg

SEQ ID NO: 299032 - DNA, 20 bp, synthetic construct
  source 1..20: mol_type = other DNA
gacagcgggactgtgggcct

SEQ ID NO: 299033 - DNA, 20 bp, synthetic construct
  source 1..20: mol_type = other DNA
ggacagcgggactgtgggcc

SEQ ID NO: 299034 - DNA, 20 bp, synthetic construct
  source 1..20: mol_type = other DNA
gggacagcgggactgtgggc

SEQ ID NO: 299035 - DNA, 20 bp, synthetic construct
  source 1..20: mol_type = other DNA
ggggacagcgggactgtggg

SEQ ID NO: 299036 - DNA, 20 bp, synthetic construct
  source 1..20: mol_type = other DNA
gggggacagcgggactgtgg

SEQ ID NO: 299037 - DNA, 20 bp, synthetic construct
  source 1..20: mol_type = other DNA
tgggggacagcgggactgtg

SEQ ID NO: 299038 - DNA, 20 bp, synthetic construct
  source 1..20: mol_type = other DNA
gtgggggacagcgggactgt

SEQ ID NO: 299039 - DNA, 20 bp, synthetic construct
  source 1..20: mol_type = other DNA
agtgggggacagcgggactg

SEQ ID NO: 299040 - DNA, 20 bp, synthetic construct
  source 1..20: mol_type = other DNA
aagtgggggacagcgggact

SEQ ID NO: 299041 - DNA, 20 bp, synthetic construct
  source 1..20: mol_type = other DNA
caagtgggggacagcgggac

SEQ ID NO: 299042 - DNA, 20 bp, synthetic construct
  source 1..20: mol_type = other DNA
gcaagtgggggacagcggga

SEQ ID NO: 299043 - DNA, 20 bp, synthetic construct
  source 1..20: mol_type = other DNA
tgcaagtgggggacagcggg

SEQ ID NO: 299044 - DNA, 20 bp, synthetic construct
  source 1..20: mol_type = other DNA
gtgcaagtgggggacagcgg

SEQ ID NO: 299045 - DNA, 20 bp, synthetic construct
  source 1..20: mol_type = other DNA
ggtgcaagtgggggacagcg

SEQ ID NO: 299046 - DNA, 20 bp, synthetic construct
  source 1..20: mol_type = other DNA
gggtgcaagtgggggacagc

SEQ ID NO: 299047 - DNA, 20 bp, synthetic construct
  source 1..20: mol_type = other DNA
agggtgcaagtgggggacag

SEQ ID NO: 299048 - DNA, 20 bp, synthetic construct
  source 1..20: mol_type = other DNA
tagggtgcaagtgggggaca

SEQ ID NO: 299049 - DNA, 20 bp, synthetic construct
  source 1..20: mol_type = other DNA
ctagggtgcaagtgggggac

SEQ ID NO: 299050 - DNA, 20 bp, synthetic construct
  source 1..20: mol_type = other DNA
gctagggtgcaagtggggga

SEQ ID NO: 299051 - DNA, 20 bp, synthetic construct
  source 1..20: mol_type = other DNA
agctagggtgcaagtggggg

SEQ ID NO: 299052 - DNA, 20 bp, synthetic construct
  source 1..20: mol_type = other DNA
aagctagggtgcaagtgggg

SEQ ID NO: 299053 - DNA, 20 bp, synthetic construct
  source 1..20: mol_type = other DNA
caagctagggtgcaagtggg

SEQ ID NO: 299054 - DNA, 20 bp, synthetic construct
  source 1..20: mol_type = other DNA
acaagctagggtgcaagtgg

SEQ ID NO: 299055 - DNA, 20 bp, synthetic construct
  source 1..20: mol_type = other DNA
tacaagctagggtgcaagtg

SEQ ID NO: 299056 - DNA, 20 bp, synthetic construct
  source 1..20: mol_type = other DNA
ctacaagctagggtgcaagt

SEQ ID NO: 299057 - DNA, 20 bp, synthetic construct
  source 1..20: mol_type = other DNA
gctacaagctagggtgcaag

SEQ ID NO: 299058 - DNA, 20 bp, synthetic construct
  source 1..20: mol_type = other DNA
agctacaagctagggtgcaa

SEQ ID NO: 299059 - DNA, 20 bp, synthetic construct
  source 1..20: mol_type = other DNA
cagctacaagctagggtgca

SEQ ID NO: 299060 - DNA, 20 bp, synthetic construct
  source 1..20: mol_type = other DNA
gcagctacaagctagggtgc

SEQ ID NO: 299061 - DNA, 20 bp, synthetic construct
  source 1..20: mol_type = other DNA
ggcagctacaagctagggtg

SEQ ID NO: 299062 - DNA, 20 bp, synthetic construct
  source 1..20: mol_type = other DNA
tggcagctacaagctagggt

SEQ ID NO: 299063 - DNA, 20 bp, synthetic construct
  source 1..20: mol_type = other DNA
ttggcagctacaagctaggg

SEQ ID NO: 299064 - DNA, 20 bp, synthetic construct
  source 1..20: mol_type = other DNA
gttggcagctacaagctagg

SEQ ID NO: 299065 - DNA, 20 bp, synthetic construct
  source 1..20: mol_type = other DNA
ggttggcagctacaagctag

SEQ ID NO: 299066 - DNA, 20 bp, synthetic construct
  source 1..20: mol_type = other DNA
aggttggcagctacaagcta

SEQ ID NO: 299067 - DNA, 20 bp, synthetic construct
  source 1..20: mol_type = other DNA
gaggttggcagctacaagct

SEQ ID NO: 299068 - DNA, 20 bp, synthetic construct
  source 1..20: mol_type = other DNA
ggaggttggcagctacaagc

SEQ ID NO: 299069 - DNA, 20 bp, synthetic construct
  source 1..20: mol_type = other DNA
gggaggttggcagctacaag

SEQ ID NO: 299070 - DNA, 20 bp, synthetic construct
  source 1..20: mol_type = other DNA
tgggaggttggcagctacaa

SEQ ID NO: 299071 - DNA, 20 bp, synthetic construct
  source 1..20: mol_type = other DNA
ctgggaggttggcagctaca

SEQ ID NO: 299072 - DNA, 20 bp, synthetic construct
  source 1..20: mol_type = other DNA
tctgggaggttggcagctac

SEQ ID NO: 299073 - DNA, 20 bp, synthetic construct
  source 1..20: mol_type = other DNA
gtctgggaggttggcagcta

SEQ ID NO: 299074 - DNA, 20 bp, synthetic construct
  source 1..20: mol_type = other DNA
tgtctgggaggttggcagct

SEQ ID NO: 299075 - DNA, 20 bp, synthetic construct
  source 1..20: mol_type = other DNA
ctgtctgggaggttggcagc

SEQ ID NO: 299076 - DNA, 20 bp, synthetic construct
  source 1..20: mol_type = other DNA
gctgtctgggaggttggcag

SEQ ID NO: 299077 - DNA, 20 bp, synthetic construct
  source 1..20: mol_type = other DNA
ggctgtctgggaggttggca

SEQ ID NO: 299078 - DNA, 20 bp, synthetic construct
  source 1..20: mol_type = other DNA
gggctgtctgggaggttggc

SEQ ID NO: 299079 - DNA, 20 bp, synthetic construct
  source 1..20: mol_type = other DNA
tgggctgtctgggaggttgg

SEQ ID NO: 299080 - DNA, 20 bp, synthetic construct
  source 1..20: mol_type = other DNA
ctgggctgtctgggaggttg

SEQ ID NO: 299081 - DNA, 20 bp, synthetic construct
  source 1..20: mol_type = other DNA
gctgggctgtctgggaggtt

SEQ ID NO: 299082 - DNA, 20 bp, synthetic construct
  source 1..20: mol_type = other DNA
ggctgggctgtctgggaggt

SEQ ID NO: 299083 - DNA, 20 bp, synthetic construct
  source 1..20: mol_type = other DNA
gggctgggctgtctgggagg

SEQ ID NO: 299084 - DNA, 20 bp, synthetic construct
  source 1..20: mol_type = other DNA
cgggctgggctgtctgggag

SEQ ID NO: 299085 - DNA, 20 bp, synthetic construct
  source 1..20: mol_type = other DNA
gcgggctgggctgtctggga

SEQ ID NO: 299086 - DNA, 20 bp, synthetic construct
  source 1..20: mol_type = other DNA
agcgggctgggctgtctggg

SEQ ID NO: 299087 - DNA, 20 bp, synthetic construct
  source 1..20: mol_type = other DNA
cagcgggctgggctgtctgg

SEQ ID NO: 299088 - DNA, 20 bp, synthetic construct
  source 1..20: mol_type = other DNA
gcagcgggctgggctgtctg

SEQ ID NO: 299089 - DNA, 20 bp, synthetic construct
  source 1..20: mol_type = other DNA
agcagcgggctgggctgtct

SEQ ID NO: 299090 - DNA, 20 bp, synthetic construct
  source 1..20: mol_type = other DNA
gagcagcgggctgggctgtc

SEQ ID NO: 299091 - DNA, 20 bp, synthetic construct
  source 1..20: mol_type = other DNA
tgagcagcgggctgggctgt

SEQ ID NO: 299092 - DNA, 20 bp, synthetic construct
  source 1..20: mol_type = other DNA
ctgagcagcgggctgggctg

SEQ ID NO: 299093 - DNA, 20 bp, synthetic construct
  source 1..20: mol_type = other DNA
gctgagcagcgggctgggct

SEQ ID NO: 299094 - DNA, 20 bp, synthetic construct
  source 1..20: mol_type = other DNA
agctgagcagcgggctgggc

SEQ ID NO: 299095 - DNA, 20 bp, synthetic construct
  source 1..20: mol_type = other DNA
gagctgagcagcgggctggg

SEQ ID NO: 299096 - DNA, 20 bp, synthetic construct
  source 1..20: mol_type = other DNA
ggagctgagcagcgggctgg

SEQ ID NO: 299097 - DNA, 20 bp, synthetic construct
  source 1..20: mol_type = other DNA
tggagctgagcagcgggctg

SEQ ID NO: 299098 - DNA, 20 bp, synthetic construct
  source 1..20: mol_type = other DNA
gtggagctgagcagcgggct

SEQ ID NO: 299099 - DNA, 20 bp, synthetic construct
  source 1..20: mol_type = other DNA
tgtggagctgagcagcgggc

SEQ ID NO: 299100 - DNA, 20 bp, synthetic construct
  source 1..20: mol_type = other DNA
atgtggagctgagcagcggg

SEQ ID NO: 299101 - DNA, 20 bp, synthetic construct
  source 1..20: mol_type = other DNA
catgtggagctgagcagcgg

SEQ ID NO: 299102 - DNA, 20 bp, synthetic construct
  source 1..20: mol_type = other DNA
gcatgtggagctgagcagcg

SEQ ID NO: 299103 - DNA, 20 bp, synthetic construct
  source 1..20: mol_type = other DNA
tgcatgtggagctgagcagc

SEQ ID NO: 299104 - DNA, 20 bp, synthetic construct
  source 1..20: mol_type = other DNA
atgcatgtggagctgagcag

SEQ ID NO: 299105 - DNA, 20 bp, synthetic construct
  source 1..20: mol_type = other DNA
tatgcatgtggagctgagca

SEQ ID NO: 299106 - DNA, 20 bp, synthetic construct
  source 1..20: mol_type = other DNA
ctatgcatgtggagctgagc

SEQ ID NO: 299107 - DNA, 20 bp, synthetic construct
  source 1..20: mol_type = other DNA
actatgcatgtggagctgag

SEQ ID NO: 299108 - DNA, 20 bp, synthetic construct
  source 1..20: mol_type = other DNA
tactatgcatgtggagctga

SEQ ID NO: 299109 - DNA, 20 bp, synthetic construct
  source 1..20: mol_type = other DNA
atactatgcatgtggagctg

SEQ ID NO: 299110 - DNA, 20 bp, synthetic construct
  source 1..20: mol_type = other DNA
gatactatgcatgtggagct

SEQ ID NO: 299111 - DNA, 20 bp, synthetic construct
  source 1..20: mol_type = other DNA
tgatactatgcatgtggagc

SEQ ID NO: 299112 - DNA, 20 bp, synthetic construct
  source 1..20: mol_type = other DNA
ctgatactatgcatgtggag

SEQ ID NO: 299113 - DNA, 20 bp, synthetic construct
  source 1..20: mol_type = other DNA
gctgatactatgcatgtgga

SEQ ID NO: 299114 - DNA, 20 bp, synthetic construct
  source 1..20: mol_type = other DNA
ggctgatactatgcatgtgg

SEQ ID NO: 299115 - DNA, 20 bp, synthetic construct
  source 1..20: mol_type = other DNA
gggctgatactatgcatgtg

SEQ ID NO: 299116 - DNA, 20 bp, synthetic construct
  source 1..20: mol_type = other DNA
agggctgatactatgcatgt

SEQ ID NO: 299117 - DNA, 20 bp, synthetic construct
  source 1..20: mol_type = other DNA
gagggctgatactatgcatg

SEQ ID NO: 299118 - DNA, 20 bp, synthetic construct
  source 1..20: mol_type = other DNA
ggagggctgatactatgcat

SEQ ID NO: 299119 - DNA, 20 bp, synthetic construct
  source 1..20: mol_type = other DNA
tggagggctgatactatgca

SEQ ID NO: 299120 - DNA, 20 bp, synthetic construct
  source 1..20: mol_type = other DNA
gtggagggctgatactatgc

SEQ ID NO: 299121 - DNA, 20 bp, synthetic construct
  source 1..20: mol_type = other DNA
tgtggagggctgatactatg

SEQ ID NO: 299122 - DNA, 20 bp, synthetic construct
  source 1..20: mol_type = other DNA
gtgtggagggctgatactat

SEQ ID NO: 299123 - DNA, 20 bp, synthetic construct
  source 1..20: mol_type = other DNA
ggtgtggagggctgatacta

SEQ ID NO: 299124 - DNA, 20 bp, synthetic construct
  source 1..20: mol_type = other DNA
gggtgtggagggctgatact

SEQ ID NO: 299125 - DNA, 20 bp, synthetic construct
  source 1..20: mol_type = other DNA
cgggtgtggagggctgatac

SEQ ID NO: 299126 - DNA, 20 bp, synthetic construct
  source 1..20: mol_type = other DNA
tcgggtgtggagggctgata

SEQ ID NO: 299127 - DNA, 20 bp, synthetic construct
  source 1..20: mol_type = other DNA
gtcgggtgtggagggctgat

SEQ ID NO: 299128 - DNA, 20 bp, synthetic construct
  source 1..20: mol_type = other DNA
tgtcgggtgtggagggctga

SEQ ID NO: 299129 - DNA, 20 bp, synthetic construct
  source 1..20: mol_type = other DNA
ttgtcgggtgtggagggctg

SEQ ID NO: 299130 - DNA, 20 bp, synthetic construct
  source 1..20: mol_type = other DNA
tttgtcgggtgtggagggct

SEQ ID NO: 299131 - DNA, 20 bp, synthetic construct
  source 1..20: mol_type = other DNA
ctttgtcgggtgtggagggc

SEQ ID NO: 299132 - DNA, 20 bp, synthetic construct
  source 1..20: mol_type = other DNA
cctttgtcgggtgtggaggg

SEQ ID NO: 299133 - DNA, 20 bp, synthetic construct
  source 1..20: mol_type = other DNA
ccctttgtcgggtgtggagg

SEQ ID NO: 299134 - DNA, 20 bp, synthetic construct
  source 1..20: mol_type = other DNA
cccctttgtcgggtgtggag

SEQ ID NO: 299135 - DNA, 20 bp, synthetic construct
  source 1..20: mol_type = other DNA
tcccctttgtcgggtgtgga

SEQ ID NO: 299136 - DNA, 20 bp, synthetic construct
  source 1..20: mol_type = other DNA
ttcccctttgtcgggtgtgg

SEQ ID NO: 299137 - DNA, 20 bp, synthetic construct
  source 1..20: mol_type = other DNA
gttcccctttgtcgggtgtg

SEQ ID NO: 299138 - DNA, 20 bp, synthetic construct
  source 1..20: mol_type = other DNA
tgttcccctttgtcgggtgt

SEQ ID NO: 299139 - DNA, 20 bp, synthetic construct
  source 1..20: mol_type = other DNA
gtgttcccctttgtcgggtg

SEQ ID NO: 299140 - DNA, 20 bp, synthetic construct
  source 1..20: mol_type = other DNA
tgtgttcccctttgtcgggt

SEQ ID NO: 299141 - DNA, 20 bp, synthetic construct
  source 1..20: mol_type = other DNA
gtgtgttcccctttgtcggg

SEQ ID NO: 299142 - DNA, 20 bp, synthetic construct
  source 1..20: mol_type = other DNA
ggtgtgttcccctttgtcgg

SEQ ID NO: 299143 - DNA, 20 bp, synthetic construct
  source 1..20: mol_type = other DNA
gggtgtgttcccctttgtcg

SEQ ID NO: 299144 - DNA, 20 bp, synthetic construct
  source 1..20: mol_type = other DNA
ggggtgtgttcccctttgtc

SEQ ID NO: 299145 - DNA, 20 bp, synthetic construct
  source 1..20: mol_type = other DNA
gggggtgtgttcccctttgt

SEQ ID NO: 299146 - DNA, 20 bp, synthetic construct
  source 1..20: mol_type = other DNA
agggggtgtgttcccctttg

SEQ ID NO: 299147 - DNA, 20 bp, synthetic construct
  source 1..20: mol_type = other DNA
aagggggtgtgttccccttt

SEQ ID NO: 299148 - DNA, 20 bp, synthetic construct
  source 1..20: mol_type = other DNA
caagggggtgtgttcccctt

SEQ ID NO: 299149 - DNA, 20 bp, synthetic construct
  source 1..20: mol_type = other DNA
ccaagggggtgtgttcccct

SEQ ID NO: 299150 - DNA, 20 bp, synthetic construct
  source 1..20: mol_type = other DNA
tccaagggggtgtgttcccc

SEQ ID NO: 299151 - DNA, 20 bp, synthetic construct
  source 1..20: mol_type = other DNA
ttccaagggggtgtgttccc

SEQ ID NO: 299152 - DNA, 20 bp, synthetic construct
  source 1..20: mol_type = other DNA
tttccaagggggtgtgttcc

SEQ ID NO: 299153 - DNA, 20 bp, synthetic construct
  source 1..20: mol_type = other DNA
atttccaagggggtgtgttc

SEQ ID NO: 299154 - DNA, 20 bp, synthetic construct
  source 1..20: mol_type = other DNA
catttccaagggggtgtgtt

SEQ ID NO: 299155 - DNA, 20 bp, synthetic construct
  source 1..20: mol_type = other DNA
ccatttccaagggggtgtgt

SEQ ID NO: 299156 - DNA, 20 bp, synthetic construct
  source 1..20: mol_type = other DNA
accatttccaagggggtgtg

SEQ ID NO: 299157 - DNA, 20 bp, synthetic construct
  source 1..20: mol_type = other DNA
aaccatttccaagggggtgt

SEQ ID NO: 299158 - DNA, 20 bp, synthetic construct
  source 1..20: mol_type = other DNA
gaaccatttccaagggggtg

SEQ ID NO: 299159 - DNA, 20 bp, synthetic construct
  source 1..20: mol_type = other DNA
agaaccatttccaagggggt

SEQ ID NO: 299160 - DNA, 20 bp, synthetic construct
  source 1..20: mol_type = other DNA
aagaaccatttccaaggggg

SEQ ID NO: 299161 - DNA, 20 bp, synthetic construct
  source 1..20: mol_type = other DNA
aaagaaccatttccaagggg

SEQ ID NO: 299162 - DNA, 20 bp, synthetic construct
  source 1..20: mol_type = other DNA
aaaagaaccatttccaaggg

SEQ ID NO: 299163 - DNA, 20 bp, synthetic construct
  source 1..20: mol_type = other DNA
gaaaagaaccatttccaagg

SEQ ID NO: 299164 - DNA, 20 bp, synthetic construct
  source 1..20: mol_type = other DNA
ggaaaagaaccatttccaag

SEQ ID NO: 299165 - DNA, 20 bp, synthetic construct
  source 1..20: mol_type = other DNA
gggaaaagaaccatttccaa

SEQ ID NO: 299166 - DNA, 20 bp, synthetic construct
  source 1..20: mol_type = other DNA
ggggaaaagaaccatttcca

SEQ ID NO: 299167 - DNA, 20 bp, synthetic construct
  source 1..20: mol_type = other DNA
gggggaaaagaaccatttcc

SEQ ID NO: 299168 - DNA, 20 bp, synthetic construct
  source 1..20: mol_type = other DNA
tgggggaaaagaaccatttc

SEQ ID NO: 299169 - DNA, 20 bp, synthetic construct
  source 1..20: mol_type = other DNA
ctgggggaaaagaaccattt

SEQ ID NO: 299170 - DNA, 20 bp, synthetic construct
  source 1..20: mol_type = other DNA
actgggggaaaagaaccatt

SEQ ID NO: 299171 - DNA, 20 bp, synthetic construct
  source 1..20: mol_type = other DNA
gactgggggaaaagaaccat

SEQ ID NO: 299172 - DNA, 20 bp, synthetic construct
  source 1..20: mol_type = other DNA
ggactgggggaaaagaacca

SEQ ID NO: 299173 - DNA, 20 bp, synthetic construct
  source 1..20: mol_type = other DNA
gggactgggggaaaagaacc

SEQ ID NO: 299174 - DNA, 20 bp, synthetic construct
  source 1..20: mol_type = other DNA
tgggactgggggaaaagaac

SEQ ID NO: 299175 - DNA, 20 bp, synthetic construct
  source 1..20: mol_type = other DNA
ctgggactgggggaaaagaa

SEQ ID NO: 299176 - DNA, 20 bp, synthetic construct
  source 1..20: mol_type = other DNA
gctgggactgggggaaaaga

SEQ ID NO: 299177 - DNA, 20 bp, synthetic construct
  source 1..20: mol_type = other DNA
agctgggactgggggaaaag

SEQ ID NO: 299178 - DNA, 20 bp, synthetic construct
  source 1..20: mol_type = other DNA
cagctgggactgggggaaaa

SEQ ID NO: 299179 - DNA, 20 bp, synthetic construct
  source 1..20: mol_type = other DNA
ccagctgggactgggggaaa

SEQ ID NO: 299180 - DNA, 20 bp, synthetic construct
  source 1..20: mol_type = other DNA
tccagctgggactgggggaa

SEQ ID NO: 299181 - DNA, 20 bp, synthetic construct
  source 1..20: mol_type = other DNA
ttccagctgggactggggga

SEQ ID NO: 299182 - DNA, 20 bp, synthetic construct
  source 1..20: mol_type = other DNA
cttccagctgggactggggg

SEQ ID NO: 299183 - DNA, 20 bp, synthetic construct
  source 1..20: mol_type = other DNA
gcttccagctgggactgggg

SEQ ID NO: 299184 - DNA, 20 bp, synthetic construct
  source 1..20: mol_type = other DNA
ggcttccagctgggactggg

SEQ ID NO: 299185 - DNA, 20 bp, synthetic construct
  source 1..20: mol_type = other DNA
tggcttccagctgggactgg

SEQ ID NO: 299186 - DNA, 20 bp, synthetic construct
  source 1..20: mol_type = other DNA
atggcttccagctgggactg

SEQ ID NO: 299187 - DNA, 20 bp, synthetic construct
  source 1..20: mol_type = other DNA
catggcttccagctgggact

SEQ ID NO: 299188 - DNA, 20 bp, synthetic construct
  source 1..20: mol_type = other DNA
gcatggcttccagctgggac

SEQ ID NO: 299189 - DNA, 20 bp, synthetic construct
  source 1..20: mol_type = other DNA
agcatggcttccagctggga

SEQ ID NO: 299190 - DNA, 20 bp, synthetic construct
  source 1..20: mol_type = other DNA
cagcatggcttccagctggg

SEQ ID NO: 299191 - DNA, 20 bp, synthetic construct
  source 1..20: mol_type = other DNA
acagcatggcttccagctgg

SEQ ID NO: 299192 - DNA, 20 bp, synthetic construct
  source 1..20: mol_type = other DNA
gacagcatggcttccagctg

SEQ ID NO: 299193 - DNA, 20 bp, synthetic construct
  source 1..20: mol_type = other DNA
agacagcatggcttccagct

SEQ ID NO: 299194 - DNA, 20 bp, synthetic construct
  source 1..20: mol_type = other DNA
cagacagcatggcttccagc

SEQ ID NO: 299195 - DNA, 20 bp, synthetic construct
  source 1..20: mol_type = other DNA
acagacagcatggcttccag

SEQ ID NO: 299196 - DNA, 20 bp, synthetic construct
  source 1..20: mol_type = other DNA
aacagacagcatggcttcca

SEQ ID NO: 299197 - DNA, 20 bp, synthetic construct
  source 1..20: mol_type = other DNA
gaacagacagcatggcttcc

SEQ ID NO: 299198 - DNA, 20 bp, synthetic construct
  source 1..20: mol_type = other DNA
agaacagacagcatggcttc

SEQ ID NO: 299199 - DNA, 20 bp, synthetic construct
  source 1..20: mol_type = other DNA
cagaacagacagcatggctt

SEQ ID NO: 299200 - DNA, 20 bp, synthetic construct
  source 1..20: mol_type = other DNA
gcagaacagacagcatggct

SEQ ID NO: 299201 - DNA, 20 bp, synthetic construct
  source 1..20: mol_type = other DNA
agcagaacagacagcatggc

SEQ ID NO: 299202 - DNA, 20 bp, synthetic construct
  source 1..20: mol_type = other DNA
cagcagaacagacagcatgg

SEQ ID NO: 299203 - DNA, 20 bp, synthetic construct
  source 1..20: mol_type = other DNA
ccagcagaacagacagcatg

SEQ ID NO: 299204 - DNA, 20 bp, synthetic construct
  source 1..20: mol_type = other DNA
tccagcagaacagacagcat

SEQ ID NO: 299205 - DNA, 20 bp, synthetic construct
  source 1..20: mol_type = other DNA
ctccagcagaacagacagca

SEQ ID NO: 299206 - DNA, 20 bp, synthetic construct
  source 1..20: mol_type = other DNA
gctccagcagaacagacagc

SEQ ID NO: 299207 - DNA, 20 bp, synthetic construct
  source 1..20: mol_type = other DNA
tgctccagcagaacagacag

SEQ ID NO: 299208 - DNA, 20 bp, synthetic construct
  source 1..20: mol_type = other DNA
ctgctccagcagaacagaca

SEQ ID NO: 299209 - DNA, 20 bp, synthetic construct
  source 1..20: mol_type = other DNA
gctgctccagcagaacagac

SEQ ID NO: 299210 - DNA, 20 bp, synthetic construct
  source 1..20: mol_type = other DNA
agctgctccagcagaacaga

SEQ ID NO: 299211 - DNA, 20 bp, synthetic construct
  source 1..20: mol_type = other DNA
cagctgctccagcagaacag

SEQ ID NO: 299212 - DNA, 20 bp, synthetic construct
  source 1..20: mol_type = other DNA
tcagctgctccagcagaaca

SEQ ID NO: 299213 - DNA, 20 bp, synthetic construct
  source 1..20: mol_type = other DNA
ttcagctgctccagcagaac

SEQ ID NO: 299214 - DNA, 20 bp, synthetic construct
  source 1..20: mol_type = other DNA
gttcagctgctccagcagaa

SEQ ID NO: 299215 - DNA, 20 bp, synthetic construct
  source 1..20: mol_type = other DNA
tgttcagctgctccagcaga

SEQ ID NO: 299216 - DNA, 20 bp, synthetic construct
  source 1..20: mol_type = other DNA
atgttcagctgctccagcag

SEQ ID NO: 299217 - DNA, 20 bp, synthetic construct
  source 1..20: mol_type = other DNA
tatgttcagctgctccagca

SEQ ID NO: 299218 - DNA, 20 bp, synthetic construct
  source 1..20: mol_type = other DNA
atatgttcagctgctccagc

SEQ ID NO: 299219 - DNA, 20 bp, synthetic construct
  source 1..20: mol_type = other DNA
tatatgttcagctgctccag

SEQ ID NO: 299220 - DNA, 20 bp, synthetic construct
  source 1..20: mol_type = other DNA
gtatatgttcagctgctcca

SEQ ID NO: 299221 - DNA, 20 bp, synthetic construct
  source 1..20: mol_type = other DNA
tgtatatgttcagctgctcc

SEQ ID NO: 299222 - DNA, 20 bp, synthetic construct
  source 1..20: mol_type = other DNA
atgtatatgttcagctgctc

SEQ ID NO: 299223 - DNA, 20 bp, synthetic construct
  source 1..20: mol_type = other DNA
tatgtatatgttcagctgct

SEQ ID NO: 299224 - DNA, 20 bp, synthetic construct
  source 1..20: mol_type = other DNA
ctatgtatatgttcagctgc

SEQ ID NO: 299225 - DNA, 20 bp, synthetic construct
  source 1..20: mol_type = other DNA
tctatgtatatgttcagctg

SEQ ID NO: 299226 - DNA, 20 bp, synthetic construct
  source 1..20: mol_type = other DNA
atctatgtatatgttcagct

SEQ ID NO: 299227 - DNA, 20 bp, synthetic construct
  source 1..20: mol_type = other DNA
catctatgtatatgttcagc

SEQ ID NO: 299228 - DNA, 20 bp, synthetic construct
  source 1..20: mol_type = other DNA
acatctatgtatatgttcag

SEQ ID NO: 299229 - DNA, 20 bp, synthetic construct
  source 1..20: mol_type = other DNA
aacatctatgtatatgttca

SEQ ID NO: 299230 - DNA, 20 bp, synthetic construct
  source 1..20: mol_type = other DNA
caacatctatgtatatgttc

SEQ ID NO: 299231 - DNA, 20 bp, synthetic construct
  source 1..20: mol_type = other DNA
gcaacatctatgtatatgtt

SEQ ID NO: 299232 - DNA, 20 bp, synthetic construct
  source 1..20: mol_type = other DNA
ggcaacatctatgtatatgt

SEQ ID NO: 299233 - DNA, 20 bp, synthetic construct
  source 1..20: mol_type = other DNA
gggcaacatctatgtatatg

SEQ ID NO: 299234 - DNA, 20 bp, synthetic construct
  source 1..20: mol_type = other DNA
agggcaacatctatgtatat

SEQ ID NO: 299235 - DNA, 20 bp, synthetic construct
  source 1..20: mol_type = other DNA
cagggcaacatctatgtata

SEQ ID NO: 299236 - DNA, 20 bp, synthetic construct
  source 1..20: mol_type = other DNA
gcagggcaacatctatgtat

SEQ ID NO: 299237 - DNA, 20 bp, synthetic construct
  source 1..20: mol_type = other DNA
ggcagggcaacatctatgta

SEQ ID NO: 299238 - DNA, 20 bp, synthetic construct
  source 1..20: mol_type = other DNA
gggcagggcaacatctatgt

SEQ ID NO: 299239 - DNA, 20 bp, synthetic construct
  source 1..20: mol_type = other DNA
agggcagggcaacatctatg

SEQ ID NO: 299240 - DNA, 20 bp, synthetic construct
  source 1..20: mol_type = other DNA
gagggcagggcaacatctat

SEQ ID NO: 299241 - DNA, 20 bp, synthetic construct
  source 1..20: mol_type = other DNA
ggagggcagggcaacatcta

SEQ ID NO: 299242 - DNA, 20 bp, synthetic construct
  source 1..20: mol_type = other DNA
gggagggcagggcaacatct

SEQ ID NO: 299243 - DNA, 20 bp, synthetic construct
  source 1..20: mol_type = other DNA
ggggagggcagggcaacatc

SEQ ID NO: 299244 - DNA, 20 bp, synthetic construct
  source 1..20: mol_type = other DNA
tggggagggcagggcaacat

SEQ ID NO: 299245 - DNA, 20 bp, synthetic construct
  source 1..20: mol_type = other DNA
atggggagggcagggcaaca

SEQ ID NO: 299246 - DNA, 20 bp, synthetic construct
  source 1..20: mol_type = other DNA
gatggggagggcagggcaac

SEQ ID NO: 299247 - DNA, 20 bp, synthetic construct
  source 1..20: mol_type = other DNA
agatggggagggcagggcaa

SEQ ID NO: 299248 - DNA, 20 bp, synthetic construct
  source 1..20: mol_type = other DNA
cagatggggagggcagggca

SEQ ID NO: 299249 - DNA, 20 bp, synthetic construct
  source 1..20: mol_type = other DNA
gcagatggggagggcagggc

SEQ ID NO: 299250 - DNA, 20 bp, synthetic construct
  source 1..20: mol_type = other DNA
tgcagatggggagggcaggg

SEQ ID NO: 299251 - DNA, 20 bp, synthetic construct
  source 1..20: mol_type = other DNA
gtgcagatggggagggcagg

SEQ ID NO: 299252 - DNA, 20 bp, synthetic construct
  source 1..20: mol_type = other DNA
ggtgcagatggggagggcag

SEQ ID NO: 299253 - DNA, 20 bp, synthetic construct
  source 1..20: mol_type = other DNA
gggtgcagatggggagggca

SEQ ID NO: 299254 - DNA, 20 bp, synthetic construct
  source 1..20: mol_type = other DNA
agggtgcagatggggagggc

SEQ ID NO: 299255 - DNA, 20 bp, synthetic construct
  source 1..20: mol_type = other DNA
cagggtgcagatggggaggg

SEQ ID NO: 299256 - DNA, 20 bp, synthetic construct
  source 1..20: mol_type = other DNA
acagggtgcagatggggagg

SEQ ID NO: 299257 - DNA, 20 bp, synthetic construct
  source 1..20: mol_type = other DNA
aacagggtgcagatggggag

SEQ ID NO: 299258 - DNA, 20 bp, synthetic construct
  source 1..20: mol_type = other DNA
caacagggtgcagatgggga

SEQ ID NO: 299259 - DNA, 20 bp, synthetic construct
  source 1..20: mol_type = other DNA
tcaacagggtgcagatgggg

SEQ ID NO: 299260 - DNA, 20 bp, synthetic construct
  source 1..20: mol_type = other DNA
ctcaacagggtgcagatggg

SEQ ID NO: 299261 - DNA, 20 bp, synthetic construct
  source 1..20: mol_type = other DNA
actcaacagggtgcagatgg

SEQ ID NO: 299262 - DNA, 20 bp, synthetic construct
  source 1..20: mol_type = other DNA
aactcaacagggtgcagatg

SEQ ID NO: 299263 - DNA, 20 bp, synthetic construct
  source 1..20: mol_type = other DNA
caactcaacagggtgcagat

SEQ ID NO: 299264 - DNA, 20 bp, synthetic construct
  source 1..20: mol_type = other DNA
acaactcaacagggtgcaga

SEQ ID NO: 299265 - DNA, 20 bp, synthetic construct
  source 1..20: mol_type = other DNA
tacaactcaacagggtgcag

SEQ ID NO: 299266 - DNA, 20 bp, synthetic construct
  source 1..20: mol_type = other DNA
ctacaactcaacagggtgca

SEQ ID NO: 299267 - DNA, 20 bp, synthetic construct
  source 1..20: mol_type = other DNA
actacaactcaacagggtgc

SEQ ID NO: 299268 - DNA, 20 bp, synthetic construct
  source 1..20: mol_type = other DNA
aactacaactcaacagggtg

SEQ ID NO: 299269 - DNA, 20 bp, synthetic construct
  source 1..20: mol_type = other DNA
caactacaactcaacagggt

SEQ ID NO: 299270 - DNA, 20 bp, synthetic construct
  source 1..20: mol_type = other DNA
ccaactacaactcaacaggg

SEQ ID NO: 299271 - DNA, 20 bp, synthetic construct
  source 1..20: mol_type = other DNA
tccaactacaactcaacagg

SEQ ID NO: 299272 - DNA, 20 bp, synthetic construct
  source 1..20: mol_type = other DNA
atccaactacaactcaacag

SEQ ID NO: 299273 - DNA, 20 bp, synthetic construct
  source 1..20: mol_type = other DNA
aatccaactacaactcaaca

SEQ ID NO: 299274 - DNA, 20 bp, synthetic construct
  source 1..20: mol_type = other DNA
aaatccaactacaactcaac

SEQ ID NO: 299275 - DNA, 20 bp, synthetic construct
  source 1..20: mol_type = other DNA
caaatccaactacaactcaa

SEQ ID NO: 299276 - DNA, 20 bp, synthetic construct
  source 1..20: mol_type = other DNA
acaaatccaactacaactca

SEQ ID NO: 299277 - DNA, 20 bp, synthetic construct
  source 1..20: mol_type = other DNA
gacaaatccaactacaactc

SEQ ID NO: 299278 - DNA, 20 bp, synthetic construct
  source 1..20: mol_type = other DNA
agacaaatccaactacaact

SEQ ID NO: 299279 - DNA, 20 bp, synthetic construct
  source 1..20: mol_type = other DNA
cagacaaatccaactacaac

SEQ ID NO: 299280 - DNA, 20 bp, synthetic construct
  source 1..20: mol_type = other DNA
acagacaaatccaactacaa

SEQ ID NO: 299281 - DNA, 20 bp, synthetic construct
  source 1..20: mol_type = other DNA
aacagacaaatccaactaca

SEQ ID NO: 299282 - DNA, 20 bp, synthetic construct
  source 1..20: mol_type = other DNA
aaacagacaaatccaactac

SEQ ID NO: 299283 - DNA, 20 bp, synthetic construct
  source 1..20: mol_type = other DNA
taaacagacaaatccaacta

SEQ ID NO: 299284 - DNA, 20 bp, synthetic construct
  source 1..20: mol_type = other DNA
ataaacagacaaatccaact

SEQ ID NO: 299285 - DNA, 20 bp, synthetic construct
  source 1..20: mol_type = other DNA
cataaacagacaaatccaac

SEQ ID NO: 299286 - DNA, 20 bp, synthetic construct
  source 1..20: mol_type = other DNA
gcataaacagacaaatccaa

SEQ ID NO: 299287 - DNA, 20 bp, synthetic construct
  source 1..20: mol_type = other DNA
agcataaacagacaaatcca

SEQ ID NO: 299288 - DNA, 20 bp, synthetic construct
  source 1..20: mol_type = other DNA
aagcataaacagacaaatcc

SEQ ID NO: 299289 - DNA, 20 bp, synthetic construct
  source 1..20: mol_type = other DNA
caagcataaacagacaaatc

SEQ ID NO: 299290 - DNA, 20 bp, synthetic construct
  source 1..20: mol_type = other DNA
ccaagcataaacagacaaat

SEQ ID NO: 299291 - DNA, 20 bp, synthetic construct
  source 1..20: mol_type = other DNA
tccaagcataaacagacaaa

SEQ ID NO: 299292 - DNA, 20 bp, synthetic construct
  source 1..20: mol_type = other DNA
atccaagcataaacagacaa

SEQ ID NO: 299293 - DNA, 20 bp, synthetic construct
  source 1..20: mol_type = other DNA
aatccaagcataaacagaca

SEQ ID NO: 299294 - DNA, 20 bp, synthetic construct
  source 1..20: mol_type = other DNA
gaatccaagcataaacagac

SEQ ID NO: 299295 - DNA, 20 bp, synthetic construct
  source 1..20: mol_type = other DNA
tgaatccaagcataaacaga

SEQ ID NO: 299296 - DNA, 20 bp, synthetic construct
  source 1..20: mol_type = other DNA
gtgaatccaagcataaacag

SEQ ID NO: 299297 - DNA, 20 bp, synthetic construct
  source 1..20: mol_type = other DNA
ggtgaatccaagcataaaca

SEQ ID NO: 299298 - DNA, 20 bp, synthetic construct
  source 1..20: mol_type = other DNA
tggtgaatccaagcataaac

SEQ ID NO: 299299 - DNA, 20 bp, synthetic construct
  source 1..20: mol_type = other DNA
ctggtgaatccaagcataaa

SEQ ID NO: 299300 - DNA, 20 bp, synthetic construct
  source 1..20: mol_type = other DNA
tctggtgaatccaagcataa

SEQ ID NO: 299301 - DNA, 20 bp, synthetic construct
  source 1..20: mol_type = other DNA
ctctggtgaatccaagcata

SEQ ID NO: 299302 - DNA, 20 bp, synthetic construct
  source 1..20: mol_type = other DNA
actctggtgaatccaagcat

SEQ ID NO: 299303 - DNA, 20 bp, synthetic construct
  source 1..20: mol_type = other DNA
cactctggtgaatccaagca

SEQ ID NO: 299304 - DNA, 20 bp, synthetic construct
  source 1..20: mol_type = other DNA
tcactctggtgaatccaagc

SEQ ID NO: 299305 - DNA, 20 bp, synthetic construct
  source 1..20: mol_type = other DNA
gtcactctggtgaatccaag

SEQ ID NO: 299306 - DNA, 20 bp, synthetic construct
  source 1..20: mol_type = other DNA
agtcactctggtgaatccaa

SEQ ID NO: 299307 - DNA, 20 bp, synthetic construct
  source 1..20: mol_type = other DNA
tagtcactctggtgaatcca

SEQ ID NO: 299308 - DNA, 20 bp, synthetic construct
  source 1..20: mol_type = other DNA
atagtcactctggtgaatcc

SEQ ID NO: 299309 - DNA, 20 bp, synthetic construct
  source 1..20: mol_type = other DNA
catagtcactctggtgaatc

SEQ ID NO: 299310 - DNA, 20 bp, synthetic construct
  source 1..20: mol_type = other DNA
tcatagtcactctggtgaat

SEQ ID NO: 299311 - DNA, 20 bp, synthetic construct
  source 1..20: mol_type = other DNA
atcatagtcactctggtgaa

SEQ ID NO: 299312 - DNA, 20 bp, synthetic construct
  source 1..20: mol_type = other DNA
tatcatagtcactctggtga

SEQ ID NO: 299313 - DNA, 20 bp, synthetic construct
  source 1..20: mol_type = other DNA
ctatcatagtcactctggtg

SEQ ID NO: 299314 - DNA, 20 bp, synthetic construct
  source 1..20: mol_type = other DNA
actatcatagtcactctggt

SEQ ID NO: 299315 - DNA, 20 bp, synthetic construct
  source 1..20: mol_type = other DNA
cactatcatagtcactctgg

SEQ ID NO: 299316 - DNA, 20 bp, synthetic construct
  source 1..20: mol_type = other DNA
tcactatcatagtcactctg

SEQ ID NO: 299317 - DNA, 20 bp, synthetic construct
  source 1..20: mol_type = other DNA
ttcactatcatagtcactct

SEQ ID NO: 299318 - DNA, 20 bp, synthetic construct
  source 1..20: mol_type = other DNA
tttcactatcatagtcactc

SEQ ID NO: 299319 - DNA, 20 bp, synthetic construct
  source 1..20: mol_type = other DNA
ttttcactatcatagtcact

SEQ ID NO: 299320 - DNA, 20 bp, synthetic construct
  source 1..20: mol_type = other DNA
cttttcactatcatagtcac

SEQ ID NO: 299321 - DNA, 20 bp, synthetic construct
  source 1..20: mol_type = other DNA
tcttttcactatcatagtca

SEQ ID NO: 299322 - DNA, 20 bp, synthetic construct
  source 1..20: mol_type = other DNA
ttcttttcactatcatagtc

SEQ ID NO: 299323 - DNA, 20 bp, synthetic construct
  source 1..20: mol_type = other DNA
tttcttttcactatcatagt

SEQ ID NO: 299324 - DNA, 20 bp, synthetic construct
  source 1..20: mol_type = other DNA
ttttcttttcactatcatag

SEQ ID NO: 299325 - DNA, 20 bp, synthetic construct
  source 1..20: mol_type = other DNA
tttttcttttcactatcata

SEQ ID NO: 299326 - DNA, 20 bp, synthetic construct
  source 1..20: mol_type = other DNA
ttttttcttttcactatcat

SEQ ID NO: 299327 - DNA, 20 bp, synthetic construct
  source 1..20: mol_type = other DNA
tttttttcttttcactatca

SEQ ID NO: 299328 - DNA, 20 bp, synthetic construct
  source 1..20: mol_type = other DNA
ttttttttcttttcactatc

SEQ ID NO: 299329 - DNA, 20 bp, synthetic construct
  source 1..20: mol_type = other DNA
tttttttttcttttcactat

SEQ ID NO: 299330 - DNA, 20 bp, synthetic construct
  source 1..20: mol_type = other DNA
ttttttttttcttttcacta

SEQ ID NO: 299331 - DNA, 20 bp, synthetic construct
  source 1..20: mol_type = other DNA
tttttttttttcttttcact

SEQ ID NO: 299332 - DNA, 20 bp, synthetic construct
  source 1..20: mol_type = other DNA
ttttttttttttcttttcac

SEQ ID NO: 299333 - DNA, 20 bp, synthetic construct
  source 1..20: mol_type = other DNA
tttttttttttttcttttca

SEQ ID NO: 299334 - DNA, 20 bp, synthetic construct
  source 1..20: mol_type = other DNA
ttttttttttttttcttttc

SEQ ID NO: 299335 - DNA, 20 bp, synthetic construct
  source 1..20: mol_type = other DNA
tttttttttttttttctttt

SEQ ID NO: 299336 - DNA, 20 bp, synthetic construct
  source 1..20: mol_type = other DNA
ttttttttttttttttcttt

SEQ ID NO: 299337 - DNA, 20 bp, synthetic construct
  source 1..20: mol_type = other DNA
tttttttttttttttttctt

SEQ ID NO: 299338 - DNA, 20 bp, synthetic construct
  source 1..20: mol_type = other DNA
ttttttttttttttttttct

SEQ ID NO: 299339 - DNA, 20 bp, synthetic construct
  source 1..20: mol_type = other DNA
cttttttttttttttttttc

SEQ ID NO: 299340 - DNA, 20 bp, synthetic construct
  source 1..20: mol_type = other DNA
cctttttttttttttttttt

SEQ ID NO: 299341 - DNA, 20 bp, synthetic construct
  source 1..20: mol_type = other DNA
tccttttttttttttttttt

SEQ ID NO: 299342 - DNA, 20 bp, synthetic construct
  source 1..20: mol_type = other DNA
gtcctttttttttttttttt

SEQ ID NO: 299343 - DNA, 20 bp, synthetic construct
  source 1..20: mol_type = other DNA
cgtccttttttttttttttt

SEQ ID NO: 299344 - DNA, 20 bp, synthetic construct
  source 1..20: mol_type = other DNA
gcgtcctttttttttttttt

SEQ ID NO: 299345 - DNA, 20 bp, synthetic construct
  source 1..20: mol_type = other DNA
tgcgtccttttttttttttt

SEQ ID NO: 299346 - DNA, 20 bp, synthetic construct
  source 1..20: mol_type = other DNA
atgcgtcctttttttttttt

SEQ ID NO: 299347 - DNA, 20 bp, synthetic construct
  source 1..20: mol_type = other DNA
catgcgtccttttttttttt

SEQ ID NO: 299348 - DNA, 20 bp, synthetic construct
  source 1..20: mol_type = other DNA
acatgcgtcctttttttttt

SEQ ID NO: 299349 - DNA, 20 bp, synthetic construct
  source 1..20: mol_type = other DNA
tacatgcgtccttttttttt

SEQ ID NO: 299350 - DNA, 20 bp, synthetic construct
  source 1..20: mol_type = other DNA
atacatgcgtcctttttttt

SEQ ID NO: 299351 - DNA, 20 bp, synthetic construct
  source 1..20: mol_type = other DNA
gatacatgcgtccttttttt

SEQ ID NO: 299352 - DNA, 20 bp, synthetic construct
  source 1..20: mol_type = other DNA
agatacatgcgtcctttttt

SEQ ID NO: 299353 - DNA, 20 bp, synthetic construct
  source 1..20: mol_type = other DNA
aagatacatgcgtccttttt

SEQ ID NO: 299354 - DNA, 20 bp, synthetic construct
  source 1..20: mol_type = other DNA
caagatacatgcgtcctttt

SEQ ID NO: 299355 - DNA, 20 bp, synthetic construct
  source 1..20: mol_type = other DNA
tcaagatacatgcgtccttt

SEQ ID NO: 299356 - DNA, 20 bp, synthetic construct
  source 1..20: mol_type = other DNA
ttcaagatacatgcgtcctt

SEQ ID NO: 299357 - DNA, 20 bp, synthetic construct
  source 1..20: mol_type = other DNA
tttcaagatacatgcgtcct

SEQ ID NO: 299358 - DNA, 20 bp, synthetic construct
  source 1..20: mol_type = other DNA
atttcaagatacatgcgtcc

SEQ ID NO: 299359 - DNA, 20 bp, synthetic construct
  source 1..20: mol_type = other DNA
catttcaagatacatgcgtc

SEQ ID NO: 299360 - DNA, 20 bp, synthetic construct
  source 1..20: mol_type = other DNA
gcatttcaagatacatgcgt

SEQ ID NO: 299361 - DNA, 20 bp, synthetic construct
  source 1..20: mol_type = other DNA
agcatttcaagatacatgcg

SEQ ID NO: 299362 - DNA, 20 bp, synthetic construct
  source 1..20: mol_type = other DNA
aagcatttcaagatacatgc

SEQ ID NO: 299363 - DNA, 20 bp, synthetic construct
  source 1..20: mol_type = other DNA
caagcatttcaagatacatg

SEQ ID NO: 299364 - DNA, 20 bp, synthetic construct
  source 1..20: mol_type = other DNA
acaagcatttcaagatacat

SEQ ID NO: 299365 - DNA, 20 bp, synthetic construct
  source 1..20: mol_type = other DNA
tacaagcatttcaagataca

SEQ ID NO: 299366 - DNA, 20 bp, synthetic construct
  source 1..20: mol_type = other DNA
ttacaagcatttcaagatac

SEQ ID NO: 299367 - DNA, 20 bp, synthetic construct
  source 1..20: mol_type = other DNA
tttacaagcatttcaagata

SEQ ID NO: 299368 - DNA, 20 bp, synthetic construct
  source 1..20: mol_type = other DNA
ctttacaagcatttcaagat

SEQ ID NO: 299369 - DNA, 20 bp, synthetic construct
  source 1..20: mol_type = other DNA
tctttacaagcatttcaaga

SEQ ID NO: 299370 - DNA, 20 bp, synthetic construct
  source 1..20: mol_type = other DNA
ctctttacaagcatttcaag

SEQ ID NO: 299371 - DNA, 20 bp, synthetic construct
  source 1..20: mol_type = other DNA
cctctttacaagcatttcaa

SEQ ID NO: 299372 - DNA, 20 bp, synthetic construct
  source 1..20: mol_type = other DNA
acctctttacaagcatttca

SEQ ID NO: 299373 - DNA, 20 bp, synthetic construct
  source 1..20: mol_type = other DNA
aacctctttacaagcatttc

SEQ ID NO: 299374 - DNA, 20 bp, synthetic construct
  source 1..20: mol_type = other DNA
aaacctctttacaagcattt

SEQ ID NO: 299375 - DNA, 20 bp, synthetic construct
  source 1..20: mol_type = other DNA
gaaacctctttacaagcatt

SEQ ID NO: 299376 - DNA, 20 bp, synthetic construct
  source 1..20: mol_type = other DNA
agaaacctctttacaagcat

SEQ ID NO: 299377 - DNA, 20 bp, synthetic construct
  source 1..20: mol_type = other DNA
tagaaacctctttacaagca

SEQ ID NO: 299378 - DNA, 20 bp, synthetic construct
  source 1..20: mol_type = other DNA
ttagaaacctctttacaagc

SEQ ID NO: 299379 - DNA, 20 bp, synthetic construct
  source 1..20: mol_type = other DNA
gttagaaacctctttacaag

SEQ ID NO: 299380 - DNA, 20 bp, synthetic construct
  source 1..20: mol_type = other DNA
ggttagaaacctctttacaa

SEQ ID NO: 299381 - DNA, 20 bp, synthetic construct
  source 1..20: mol_type = other DNA
gggttagaaacctctttaca

SEQ ID NO: 299382 - DNA, 20 bp, synthetic construct
  source 1..20: mol_type = other DNA
tgggttagaaacctctttac

SEQ ID NO: 299383 - DNA, 20 bp, synthetic construct
  source 1..20: mol_type = other DNA
gtgggttagaaacctcttta

SEQ ID NO: 299384 - DNA, 20 bp, synthetic construct
  source 1..20: mol_type = other DNA
ggtgggttagaaacctcttt

SEQ ID NO: 299385 - DNA, 20 bp, synthetic construct
  source 1..20: mol_type = other DNA
gggtgggttagaaacctctt

SEQ ID NO: 299386 - DNA, 20 bp, synthetic construct
  source 1..20: mol_type = other DNA
agggtgggttagaaacctct

SEQ ID NO: 299387 - DNA, 20 bp, synthetic construct
  source 1..20: mol_type = other DNA
gagggtgggttagaaacctc

SEQ ID NO: 299388 - DNA, 20 bp, synthetic construct
  source 1..20: mol_type = other DNA
tgagggtgggttagaaacct

SEQ ID NO: 299389 - DNA, 20 bp, synthetic construct
  source 1..20: mol_type = other DNA
gtgagggtgggttagaaacc

SEQ ID NO: 299390 - DNA, 20 bp, synthetic construct
  source 1..20: mol_type = other DNA
cgtgagggtgggttagaaac

SEQ ID NO: 299391 - DNA, 20 bp, synthetic construct
  source 1..20: mol_type = other DNA
tcgtgagggtgggttagaaa

SEQ ID NO: 299392 - DNA, 20 bp, synthetic construct
  source 1..20: mol_type = other DNA
ctcgtgagggtgggttagaa

SEQ ID NO: 299393 - DNA, 20 bp, synthetic construct
  source 1..20: mol_type = other DNA
cctcgtgagggtgggttaga

SEQ ID NO: 299394 - DNA, 20 bp, synthetic construct
  source 1..20: mol_type = other DNA
acctcgtgagggtgggttag

SEQ ID NO: 299395 - DNA, 20 bp, synthetic construct
  source 1..20: mol_type = other DNA
cacctcgtgagggtgggtta

SEQ ID NO: 299396 - DNA, 20 bp, synthetic construct
  source 1..20: mol_type = other DNA
acacctcgtgagggtgggtt

SEQ ID NO: 299397 - DNA, 20 bp, synthetic construct
  source 1..20: mol_type = other DNA
gacacctcgtgagggtgggt

SEQ ID NO: 299398 - DNA, 20 bp, synthetic construct
  source 1..20: mol_type = other DNA
agacacctcgtgagggtggg

SEQ ID NO: 299399 - DNA, 20 bp, synthetic construct
  source 1..20: mol_type = other DNA
gagacacctcgtgagggtgg

SEQ ID NO: 299400 - DNA, 20 bp, synthetic construct
  source 1..20: mol_type = other DNA
agagacacctcgtgagggtg

SEQ ID NO: 299401 - DNA, 20 bp, synthetic construct
  source 1..20: mol_type = other DNA
gagagacacctcgtgagggt

SEQ ID NO: 299402 - DNA, 20 bp, synthetic construct
  source 1..20: mol_type = other DNA
tgagagacacctcgtgaggg

SEQ ID NO: 299403 - DNA, 20 bp, synthetic construct
  source 1..20: mol_type = other DNA
gtgagagacacctcgtgagg

SEQ ID NO: 299404 - DNA, 20 bp, synthetic construct
  source 1..20: mol_type = other DNA
ggtgagagacacctcgtgag

SEQ ID NO: 299405 - DNA, 20 bp, synthetic construct
  source 1..20: mol_type = other DNA
gggtgagagacacctcgtga

SEQ ID NO: 299406 - DNA, 20 bp, synthetic construct
  source 1..20: mol_type = other DNA
ggggtgagagacacctcgtg

SEQ ID NO: 299407 - DNA, 20 bp, synthetic construct
  source 1..20: mol_type = other DNA
gggggtgagagacacctcgt

SEQ ID NO: 299408 - DNA, 20 bp, synthetic construct
  source 1..20: mol_type = other DNA
tgggggtgagagacacctcg

SEQ ID NO: 299409 - DNA, 20 bp, synthetic construct
  source 1..20: mol_type = other DNA
gtgggggtgagagacacctc

SEQ ID NO: 299410 - DNA, 20 bp, synthetic construct
  source 1..20: mol_type = other DNA
tgtgggggtgagagacacct

SEQ ID NO: 299411 - DNA, 20 bp, synthetic construct
  source 1..20: mol_type = other DNA
gtgtgggggtgagagacacc

SEQ ID NO: 299412 - DNA, 20 bp, synthetic construct
  source 1..20: mol_type = other DNA
agtgtgggggtgagagacac

SEQ ID NO: 299413 - DNA, 20 bp, synthetic construct
  source 1..20: mol_type = other DNA
cagtgtgggggtgagagaca

SEQ ID NO: 299414 - DNA, 20 bp, synthetic construct
  source 1..20: mol_type = other DNA
ccagtgtgggggtgagagac

SEQ ID NO: 299415 - DNA, 20 bp, synthetic construct
  source 1..20: mol_type = other DNA
cccagtgtgggggtgagaga

SEQ ID NO: 299416 - DNA, 20 bp, synthetic construct
  source 1..20: mol_type = other DNA
tcccagtgtgggggtgagag

SEQ ID NO: 299417 - DNA, 20 bp, synthetic construct
  source 1..20: mol_type = other DNA
gtcccagtgtgggggtgaga

SEQ ID NO: 299418 - DNA, 20 bp, synthetic construct
  source 1..20: mol_type = other DNA
agtcccagtgtgggggtgag

SEQ ID NO: 299419 - DNA, 20 bp, synthetic construct
  source 1..20: mol_type = other DNA
gagtcccagtgtgggggtga

SEQ ID NO: 299420 - DNA, 20 bp, synthetic construct
  source 1..20: mol_type = other DNA
cgagtcccagtgtgggggtg

SEQ ID NO: 299421 - DNA, 20 bp, synthetic construct
  source 1..20: mol_type = other DNA
acgagtcccagtgtgggggt

SEQ ID NO: 299422 - DNA, 20 bp, synthetic construct
  source 1..20: mol_type = other DNA
cacgagtcccagtgtggggg

SEQ ID NO: 299423 - DNA, 20 bp, synthetic construct
  source 1..20: mol_type = other DNA
acacgagtcccagtgtgggg

SEQ ID NO: 299424 - DNA, 20 bp, synthetic construct
  source 1..20: mol_type = other DNA
cacacgagtcccagtgtggg

SEQ ID NO: 299425 - DNA, 20 bp, synthetic construct
  source 1..20: mol_type = other DNA
ccacacgagtcccagtgtgg

SEQ ID NO: 299426 - DNA, 20 bp, synthetic construct
  source 1..20: mol_type = other DNA
gccacacgagtcccagtgtg

SEQ ID NO: 299427 - DNA, 20 bp, synthetic construct
  source 1..20: mol_type = other DNA
ggccacacgagtcccagtgt

SEQ ID NO: 299428 - DNA, 20 bp, synthetic construct
  source 1..20: mol_type = other DNA
aggccacacgagtcccagtg

SEQ ID NO: 299429 - DNA, 20 bp, synthetic construct
  source 1..20: mol_type = other DNA
caggccacacgagtcccagt

SEQ ID NO: 299430 - DNA, 20 bp, synthetic construct
  source 1..20: mol_type = other DNA
acaggccacacgagtcccag

SEQ ID NO: 299431 - DNA, 20 bp, synthetic construct
  source 1..20: mol_type = other DNA
cacaggccacacgagtccca

SEQ ID NO: 299432 - DNA, 20 bp, synthetic construct
  source 1..20: mol_type = other DNA
acacaggccacacgagtccc

SEQ ID NO: 299433 - DNA, 20 bp, synthetic construct
  source 1..20: mol_type = other DNA
cacacaggccacacgagtcc

SEQ ID NO: 299434 - DNA, 20 bp, synthetic construct
  source 1..20: mol_type = other DNA
ccacacaggccacacgagtc

SEQ ID NO: 299435 - DNA, 20 bp, synthetic construct
  source 1..20: mol_type = other DNA
accacacaggccacacgagt

SEQ ID NO: 299436 - DNA, 20 bp, synthetic construct
  source 1..20: mol_type = other DNA
caccacacaggccacacgag

SEQ ID NO: 299437 - DNA, 20 bp, synthetic construct
  source 1..20: mol_type = other DNA
gcaccacacaggccacacga

SEQ ID NO: 299438 - DNA, 20 bp, synthetic construct
  source 1..20: mol_type = other DNA
ggcaccacacaggccacacg

SEQ ID NO: 299439 - DNA, 20 bp, synthetic construct
  source 1..20: mol_type = other DNA
tggcaccacacaggccacac

SEQ ID NO: 299440 - DNA, 20 bp, synthetic construct
  source 1..20: mol_type = other DNA
gtggcaccacacaggccaca

SEQ ID NO: 299441 - DNA, 20 bp, synthetic construct
  source 1..20: mol_type = other DNA
ggtggcaccacacaggccac

SEQ ID NO: 299442 - DNA, 20 bp, synthetic construct
  source 1..20: mol_type = other DNA
gggtggcaccacacaggcca

SEQ ID NO: 299443 - DNA, 20 bp, synthetic construct
  source 1..20: mol_type = other DNA
agggtggcaccacacaggcc

SEQ ID NO: 299444 - DNA, 20 bp, synthetic construct
  source 1..20: mol_type = other DNA
cagggtggcaccacacaggc

SEQ ID NO: 299445 - DNA, 20 bp, synthetic construct
  source 1..20: mol_type = other DNA
gcagggtggcaccacacagg

SEQ ID NO: 299446 - DNA, 20 bp, synthetic construct
  source 1..20: mol_type = other DNA
agcagggtggcaccacacag

SEQ ID NO: 299447 - DNA, 20 bp, synthetic construct
  source 1..20: mol_type = other DNA
cagcagggtggcaccacaca

SEQ ID NO: 299448 - DNA, 20 bp, synthetic construct
  source 1..20: mol_type = other DNA
ccagcagggtggcaccacac

SEQ ID NO: 299449 - DNA, 20 bp, synthetic construct
  source 1..20: mol_type = other DNA
cccagcagggtggcaccaca

SEQ ID NO: 299450 - DNA, 20 bp, synthetic construct
  source 1..20: mol_type = other DNA
ccccagcagggtggcaccac

SEQ ID NO: 299451 - DNA, 20 bp, synthetic construct
  source 1..20: mol_type = other DNA
gccccagcagggtggcacca

SEQ ID NO: 299452 - DNA, 20 bp, synthetic construct
  source 1..20: mol_type = other DNA
ggccccagcagggtggcacc

SEQ ID NO: 299453 - DNA, 20 bp, synthetic construct
  source 1..20: mol_type = other DNA
aggccccagcagggtggcac

SEQ ID NO: 299454 - DNA, 20 bp, synthetic construct
  source 1..20: mol_type = other DNA
gaggccccagcagggtggca

SEQ ID NO: 299455 - DNA, 20 bp, synthetic construct
  source 1..20: mol_type = other DNA
ggaggccccagcagggtggc

SEQ ID NO: 299456 - DNA, 20 bp, synthetic construct
  source 1..20: mol_type = other DNA
gggaggccccagcagggtgg

SEQ ID NO: 299457 - DNA, 20 bp, synthetic construct
  source 1..20: mol_type = other DNA
tgggaggccccagcagggtg

SEQ ID NO: 299458 - DNA, 20 bp, synthetic construct
  source 1..20: mol_type = other DNA
ttgggaggccccagcagggt

SEQ ID NO: 299459 - DNA, 20 bp, synthetic construct
  source 1..20: mol_type = other DNA
cttgggaggccccagcaggg

SEQ ID NO: 299460 - DNA, 20 bp, synthetic construct
  source 1..20: mol_type = other DNA
acttgggaggccccagcagg

SEQ ID NO: 299461 - DNA, 20 bp, synthetic construct
  source 1..20: mol_type = other DNA
aacttgggaggccccagcag

SEQ ID NO: 299462 - DNA, 20 bp, synthetic construct
  source 1..20: mol_type = other DNA
aaacttgggaggccccagca

SEQ ID NO: 299463 - DNA, 20 bp, synthetic construct
  source 1..20: mol_type = other DNA
aaaacttgggaggccccagc

SEQ ID NO: 299464 - DNA, 20 bp, synthetic construct
  source 1..20: mol_type = other DNA
caaaacttgggaggccccag

SEQ ID NO: 299465 - DNA, 20 bp, synthetic construct
  source 1..20: mol_type = other DNA
tcaaaacttgggaggcccca

SEQ ID NO: 299466 - DNA, 20 bp, synthetic construct
  source 1..20: mol_type = other DNA
ttcaaaacttgggaggcccc

SEQ ID NO: 299467 - DNA, 20 bp, synthetic construct
  source 1..20: mol_type = other DNA
tttcaaaacttgggaggccc

SEQ ID NO: 299468 - DNA, 20 bp, synthetic construct
  source 1..20: mol_type = other DNA
ctttcaaaacttgggaggcc

SEQ ID NO: 299469 - DNA, 20 bp, synthetic construct
  source 1..20: mol_type = other DNA
cctttcaaaacttgggaggc

SEQ ID NO: 299470 - DNA, 20 bp, synthetic construct
  source 1..20: mol_type = other DNA
gcctttcaaaacttgggagg

SEQ ID NO: 299471 - DNA, 20 bp, synthetic construct
  source 1..20: mol_type = other DNA
agcctttcaaaacttgggag

SEQ ID NO: 299472 - DNA, 20 bp, synthetic construct
  source 1..20: mol_type = other DNA
aagcctttcaaaacttggga

SEQ ID NO: 299473 - DNA, 20 bp, synthetic construct
  source 1..20: mol_type = other DNA
aaagcctttcaaaacttggg

SEQ ID NO: 299474 - DNA, 20 bp, synthetic construct
  source 1..20: mol_type = other DNA
gaaagcctttcaaaacttgg

SEQ ID NO: 299475 - DNA, 20 bp, synthetic construct
  source 1..20: mol_type = other DNA
ggaaagcctttcaaaacttg

SEQ ID NO: 299476 - DNA, 20 bp, synthetic construct
  source 1..20: mol_type = other DNA
aggaaagcctttcaaaactt

SEQ ID NO: 299477 - DNA, 20 bp, synthetic construct
  source 1..20: mol_type = other DNA
gaggaaagcctttcaaaact

SEQ ID NO: 299478 - DNA, 20 bp, synthetic construct
  source 1..20: mol_type = other DNA
tgaggaaagcctttcaaaac

SEQ ID NO: 299479 - DNA, 20 bp, synthetic construct
  source 1..20: mol_type = other DNA
ctgaggaaagcctttcaaaa

SEQ ID NO: 299480 - DNA, 20 bp, synthetic construct
  source 1..20: mol_type = other DNA
gctgaggaaagcctttcaaa

SEQ ID NO: 299481 - DNA, 20 bp, synthetic construct
  source 1..20: mol_type = other DNA
tgctgaggaaagcctttcaa

SEQ ID NO: 299482 - DNA, 20 bp, synthetic construct
  source 1..20: mol_type = other DNA
gtgctgaggaaagcctttca

SEQ ID NO: 299483 - DNA, 20 bp, synthetic construct
  source 1..20: mol_type = other DNA
ggtgctgaggaaagcctttc

SEQ ID NO: 299484 - DNA, 20 bp, synthetic construct
  source 1..20: mol_type = other DNA
aggtgctgaggaaagccttt

SEQ ID NO: 299485 - DNA, 20 bp, synthetic construct
  source 1..20: mol_type = other DNA
caggtgctgaggaaagcctt

SEQ ID NO: 299486 - DNA, 20 bp, synthetic construct
  source 1..20: mol_type = other DNA
ccaggtgctgaggaaagcct

SEQ ID NO: 299487 - DNA, 20 bp, synthetic construct
  source 1..20: mol_type = other DNA
cccaggtgctgaggaaagcc

SEQ ID NO: 299488 - DNA, 20 bp, synthetic construct
  source 1..20: mol_type = other DNA
tcccaggtgctgaggaaagc

SEQ ID NO: 299489 - DNA, 20 bp, synthetic construct
  source 1..20: mol_type = other DNA
gtcccaggtgctgaggaaag

SEQ ID NO: 299490 - DNA, 20 bp, synthetic construct
  source 1..20: mol_type = other DNA
ggtcccaggtgctgaggaaa

SEQ ID NO: 299491 - DNA, 20 bp, synthetic construct
  source 1..20: mol_type = other DNA
gggtcccaggtgctgaggaa

SEQ ID NO: 299492 - DNA, 20 bp, synthetic construct
  source 1..20: mol_type = other DNA
tgggtcccaggtgctgagga

SEQ ID NO: 299493 - DNA, 20 bp, synthetic construct
  source 1..20: mol_type = other DNA
ttgggtcccaggtgctgagg

SEQ ID NO: 299494 - DNA, 20 bp, synthetic construct
  source 1..20: mol_type = other DNA
gttgggtcccaggtgctgag

SEQ ID NO: 299495 - DNA, 20 bp, synthetic construct
  source 1..20: mol_type = other DNA
tgttgggtcccaggtgctga

SEQ ID NO: 299496 - DNA, 20 bp, synthetic construct
  source 1..20: mol_type = other DNA
ctgttgggtcccaggtgctg

SEQ ID NO: 299497 - DNA, 20 bp, synthetic construct
  source 1..20: mol_type = other DNA
tctgttgggtcccaggtgct

SEQ ID NO: 299498 - DNA, 20 bp, synthetic construct
  source 1..20: mol_type = other DNA
ctctgttgggtcccaggtgc

SEQ ID NO: 299499 - DNA, 20 bp, synthetic construct
  source 1..20: mol_type = other DNA
tctctgttgggtcccaggtg

SEQ ID NO: 299500 - DNA, 20 bp, synthetic construct
  source 1..20: mol_type = other DNA
gtctctgttgggtcccaggt

SEQ ID NO: 299501 - DNA, 20 bp, synthetic construct
  source 1..20: mol_type = other DNA
ggtctctgttgggtcccagg

SEQ ID NO: 299502 - DNA, 20 bp, synthetic construct
  source 1..20: mol_type = other DNA
tggtctctgttgggtcccag

SEQ ID NO: 299503 - DNA, 20 bp, synthetic construct
  source 1..20: mol_type = other DNA
ctggtctctgttgggtccca

SEQ ID NO: 299504 - DNA, 20 bp, synthetic construct
  source 1..20: mol_type = other DNA
gctggtctctgttgggtccc

SEQ ID NO: 299505 - DNA, 20 bp, synthetic construct
  source 1..20: mol_type = other DNA
agctggtctctgttgggtcc

SEQ ID NO: 299506 - DNA, 20 bp, synthetic construct
  source 1..20: mol_type = other DNA
aagctggtctctgttgggtc

SEQ ID NO: 299507 - DNA, 20 bp, synthetic construct
  source 1..20: mol_type = other DNA
gaagctggtctctgttgggt

SEQ ID NO: 299508 - DNA, 20 bp, synthetic construct
  source 1..20: mol_type = other DNA
agaagctggtctctgttggg

SEQ ID NO: 299509 - DNA, 20 bp, synthetic construct
  source 1..20: mol_type = other DNA
tagaagctggtctctgttgg

SEQ ID NO: 299510 - DNA, 20 bp, synthetic construct
  source 1..20: mol_type = other DNA
ctagaagctggtctctgttg

SEQ ID NO: 299511 - DNA, 20 bp, synthetic construct
  source 1..20: mol_type = other DNA
gctagaagctggtctctgtt

SEQ ID NO: 299512 - DNA, 20 bp, synthetic construct
  source 1..20: mol_type = other DNA
tgctagaagctggtctctgt

SEQ ID NO: 299513 - DNA, 20 bp, synthetic construct
  source 1..20: mol_type = other DNA
ctgctagaagctggtctctg

SEQ ID NO: 299514 - DNA, 20 bp, synthetic construct
  source 1..20: mol_type = other DNA
gctgctagaagctggtctct

SEQ ID NO: 299515 - DNA, 20 bp, synthetic construct
  source 1..20: mol_type = other DNA
agctgctagaagctggtctc

SEQ ID NO: 299516 - DNA, 20 bp, synthetic construct
  source 1..20: mol_type = other DNA
tagctgctagaagctggtct

SEQ ID NO: 299517 - DNA, 20 bp, synthetic construct
  source 1..20: mol_type = other DNA
ttagctgctagaagctggtc

SEQ ID NO: 299518 - DNA, 20 bp, synthetic construct
  source 1..20: mol_type = other DNA
cttagctgctagaagctggt

SEQ ID NO: 299519 - DNA, 20 bp, synthetic construct
  source 1..20: mol_type = other DNA
ccttagctgctagaagctgg

SEQ ID NO: 299520 - DNA, 20 bp, synthetic construct
  source 1..20: mol_type = other DNA
tccttagctgctagaagctg

SEQ ID NO: 299521 - DNA, 20 bp, synthetic construct
  source 1..20: mol_type = other DNA
ctccttagctgctagaagct

SEQ ID NO: 299522 - DNA, 20 bp, synthetic construct
  source 1..20: mol_type = other DNA
cctccttagctgctagaagc

SEQ ID NO: 299523 - DNA, 20 bp, synthetic construct
  source 1..20: mol_type = other DNA
gcctccttagctgctagaag

SEQ ID NO: 299524 - DNA, 20 bp, synthetic construct
  source 1..20: mol_type = other DNA
ggcctccttagctgctagaa

SEQ ID NO: 299525 - DNA, 20 bp, synthetic construct
  source 1..20: mol_type = other DNA
cggcctccttagctgctaga

SEQ ID NO: 299526 - DNA, 20 bp, synthetic construct
  source 1..20: mol_type = other DNA
acggcctccttagctgctag

SEQ ID NO: 299527 - DNA, 20 bp, synthetic construct
  source 1..20: mol_type = other DNA
aacggcctccttagctgcta

SEQ ID NO: 299528 - DNA, 20 bp, synthetic construct
  source 1..20: mol_type = other DNA
gaacggcctccttagctgct

SEQ ID NO: 299529 - DNA, 20 bp, synthetic construct
  source 1..20: mol_type = other DNA
tgaacggcctccttagctgc

SEQ ID NO: 299530 - DNA, 20 bp, synthetic construct
  source 1..20: mol_type = other DNA
ctgaacggcctccttagctg

SEQ ID NO: 299531 - DNA, 20 bp, synthetic construct
  source 1..20: mol_type = other DNA
gctgaacggcctccttagct

SEQ ID NO: 299532 - DNA, 20 bp, synthetic construct
  source 1..20: mol_type = other DNA
agctgaacggcctccttagc

SEQ ID NO: 299533 - DNA, 20 bp, synthetic construct
  source 1..20: mol_type = other DNA
cagctgaacggcctccttag

SEQ ID NO: 299534 - DNA, 20 bp, synthetic construct
  source 1..20: mol_type = other DNA
acagctgaacggcctcctta

SEQ ID NO: 299535 - DNA, 20 bp, synthetic construct
  source 1..20: mol_type = other DNA
cacagctgaacggcctcctt

SEQ ID NO: 299536 - DNA, 20 bp, synthetic construct
  source 1..20: mol_type = other DNA
tcacagctgaacggcctcct

SEQ ID NO: 299537 - DNA, 20 bp, synthetic construct
  source 1..20: mol_type = other DNA
gtcacagctgaacggcctcc

SEQ ID NO: 299538 - DNA, 20 bp, synthetic construct
  source 1..20: mol_type = other DNA
cgtcacagctgaacggcctc

SEQ ID NO: 299539 - DNA, 20 bp, synthetic construct
  source 1..20: mol_type = other DNA
tcgtcacagctgaacggcct

SEQ ID NO: 299540 - DNA, 20 bp, synthetic construct
  source 1..20: mol_type = other DNA
ttcgtcacagctgaacggcc

SEQ ID NO: 299541 - DNA, 20 bp, synthetic construct
  source 1..20: mol_type = other DNA
cttcgtcacagctgaacggc

SEQ ID NO: 299542 - DNA, 20 bp, synthetic construct
  source 1..20: mol_type = other DNA
ccttcgtcacagctgaacgg

SEQ ID NO: 299543 - DNA, 20 bp, synthetic construct
  source 1..20: mol_type = other DNA
gccttcgtcacagctgaacg

SEQ ID NO: 299544 - DNA, 20 bp, synthetic construct
  source 1..20: mol_type = other DNA
ggccttcgtcacagctgaac

SEQ ID NO: 299545 - DNA, 20 bp, synthetic construct
  source 1..20: mol_type = other DNA
aggccttcgtcacagctgaa

SEQ ID NO: 299546 - DNA, 20 bp, synthetic construct
  source 1..20: mol_type = other DNA
caggccttcgtcacagctga

SEQ ID NO: 299547 - DNA, 20 bp, synthetic construct
  source 1..20: mol_type = other DNA
tcaggccttcgtcacagctg

SEQ ID NO: 299548 - DNA, 20 bp, synthetic construct
  source 1..20: mol_type = other DNA
ttcaggccttcgtcacagct

SEQ ID NO: 299549 - DNA, 20 bp, synthetic construct
  source 1..20: mol_type = other DNA
cttcaggccttcgtcacagc

SEQ ID NO: 299550 - DNA, 20 bp, synthetic construct
  source 1..20: mol_type = other DNA
gcttcaggccttcgtcacag

SEQ ID NO: 299551 - DNA, 20 bp, synthetic construct
  source 1..20: mol_type = other DNA
tgcttcaggccttcgtcaca

SEQ ID NO: 299552 - DNA, 20 bp, synthetic construct
  source 1..20: mol_type = other DNA
gtgcttcaggccttcgtcac

SEQ ID NO: 299553 - DNA, 20 bp, synthetic construct
  source 1..20: mol_type = other DNA
tgtgcttcaggccttcgtca

SEQ ID NO: 299554 - DNA, 20 bp, synthetic construct
  source 1..20: mol_type = other DNA
ctgtgcttcaggccttcgtc

SEQ ID NO: 299555 - DNA, 20 bp, synthetic construct
  source 1..20: mol_type = other DNA
cctgtgcttcaggccttcgt

SEQ ID NO: 299556 - DNA, 20 bp, synthetic construct
  source 1..20: mol_type = other DNA
tcctgtgcttcaggccttcg

SEQ ID NO: 299557 - DNA, 20 bp, synthetic construct
  source 1..20: mol_type = other DNA
atcctgtgcttcaggccttc

SEQ ID NO: 299558 - DNA, 20 bp, synthetic construct
  source 1..20: mol_type = other DNA
aatcctgtgcttcaggcctt

SEQ ID NO: 299559 - DNA, 20 bp, synthetic construct
  source 1..20: mol_type = other DNA
taatcctgtgcttcaggcct

SEQ ID NO: 299560 - DNA, 20 bp, synthetic construct
  source 1..20: mol_type = other DNA
ctaatcctgtgcttcaggcc

SEQ ID NO: 299561 - DNA, 20 bp, synthetic construct
  source 1..20: mol_type = other DNA
cctaatcctgtgcttcaggc

SEQ ID NO: 299562 - DNA, 20 bp, synthetic construct
  source 1..20: mol_type = other DNA
tcctaatcctgtgcttcagg

SEQ ID NO: 299563 - DNA, 20 bp, synthetic construct
  source 1..20: mol_type = other DNA
gtcctaatcctgtgcttcag

SEQ ID NO: 299564 - DNA, 20 bp, synthetic construct
  source 1..20: mol_type = other DNA
agtcctaatcctgtgcttca

SEQ ID NO: 299565 - DNA, 20 bp, synthetic construct
  source 1..20: mol_type = other DNA
cagtcctaatcctgtgcttc

SEQ ID NO: 299566 - DNA, 20 bp, synthetic construct
  source 1..20: mol_type = other DNA
tcagtcctaatcctgtgctt

SEQ ID NO: 299567 - DNA, 20 bp, synthetic construct
  source 1..20: mol_type = other DNA
ttcagtcctaatcctgtgct

SEQ ID NO: 299568 - DNA, 20 bp, synthetic construct
  source 1..20: mol_type = other DNA
cttcagtcctaatcctgtgc

SEQ ID NO: 299569 - DNA, 20 bp, synthetic construct
  source 1..20: mol_type = other DNA
gcttcagtcctaatcctgtg

SEQ ID NO: 299570 - DNA, 20 bp, synthetic construct
  source 1..20: mol_type = other DNA
cgcttcagtcctaatcctgt

SEQ ID NO: 299571 - DNA, 20 bp, synthetic construct
  source 1..20: mol_type = other DNA
tcgcttcagtcctaatcctg

SEQ ID NO: 299572 - DNA, 20 bp, synthetic construct
  source 1..20: mol_type = other DNA
atcgcttcagtcctaatcct

SEQ ID NO: 299573 - DNA, 20 bp, synthetic construct
  source 1..20: mol_type = other DNA
catcgcttcagtcctaatcc

SEQ ID NO: 299574 - DNA, 20 bp, synthetic construct
  source 1..20: mol_type = other DNA
tcatcgcttcagtcctaatc

SEQ ID NO: 299575 - DNA, 20 bp, synthetic construct
  source 1..20: mol_type = other DNA
atcatcgcttcagtcctaat

SEQ ID NO: 299576 - DNA, 20 bp, synthetic construct
  source 1..20: mol_type = other DNA
catcatcgcttcagtcctaa

SEQ ID NO: 299577 - DNA, 20 bp, synthetic construct
  source 1..20: mol_type = other DNA
acatcatcgcttcagtccta

SEQ ID NO: 299578 - DNA, 20 bp, synthetic construct
  source 1..20: mol_type = other DNA
gacatcatcgcttcagtcct

SEQ ID NO: 299579 - DNA, 20 bp, synthetic construct
  source 1..20: mol_type = other DNA
ggacatcatcgcttcagtcc

SEQ ID NO: 299580 - DNA, 20 bp, synthetic construct
  source 1..20: mol_type = other DNA
gggacatcatcgcttcagtc

SEQ ID NO: 299581 - DNA, 20 bp, synthetic construct
  source 1..20: mol_type = other DNA
ggggacatcatcgcttcagt

SEQ ID NO: 299582 - DNA, 20 bp, synthetic construct
  source 1..20: mol_type = other DNA
aggggacatcatcgcttcag

SEQ ID NO: 299583 - DNA, 20 bp, synthetic construct
  source 1..20: mol_type = other DNA
aaggggacatcatcgcttca

SEQ ID NO: 299584 - DNA, 20 bp, synthetic construct
  source 1..20: mol_type = other DNA
gaaggggacatcatcgcttc

SEQ ID NO: 299585 - DNA, 20 bp, synthetic construct
  source 1..20: mol_type = other DNA
ggaaggggacatcatcgctt

SEQ ID NO: 299586 - DNA, 20 bp, synthetic construct
  source 1..20: mol_type = other DNA
gggaaggggacatcatcgct

SEQ ID NO: 299587 - DNA, 20 bp, synthetic construct
  source 1..20: mol_type = other DNA
agggaaggggacatcatcgc

SEQ ID NO: 299588 - DNA, 20 bp, synthetic construct
  source 1..20: mol_type = other DNA
tagggaaggggacatcatcg

SEQ ID NO: 299589 - DNA, 20 bp, synthetic construct
  source 1..20: mol_type = other DNA
gtagggaaggggacatcatc

SEQ ID NO: 299590 - DNA, 20 bp, synthetic construct
  source 1..20: mol_type = other DNA
agtagggaaggggacatcat

SEQ ID NO: 299591 - DNA, 20 bp, synthetic construct
  source 1..20: mol_type = other DNA
aagtagggaaggggacatca

SEQ ID NO: 299592 - DNA, 20 bp, synthetic construct
  source 1..20: mol_type = other DNA
gaagtagggaaggggacatc

SEQ ID NO: 299593 - DNA, 20 bp, synthetic construct
  source 1..20: mol_type = other DNA
ggaagtagggaaggggacat

SEQ ID NO: 299594 - DNA, 20 bp, synthetic construct
  source 1..20: mol_type = other DNA
gggaagtagggaaggggaca

SEQ ID NO: 299595 - DNA, 20 bp, synthetic construct
  source 1..20: mol_type = other DNA
ggggaagtagggaaggggac

SEQ ID NO: 299596 - DNA, 20 bp, synthetic construct
  source 1..20: mol_type = other DNA
aggggaagtagggaagggga

SEQ ID NO: 299597 - DNA, 20 bp, synthetic construct
  source 1..20: mol_type = other DNA
aaggggaagtagggaagggg

SEQ ID NO: 299598 - DNA, 20 bp, synthetic construct
  source 1..20: mol_type = other DNA
caaggggaagtagggaaggg

SEQ ID NO: 299599 - DNA, 20 bp, synthetic construct
  source 1..20: mol_type = other DNA
ccaaggggaagtagggaagg

SEQ ID NO: 299600 - DNA, 20 bp, synthetic construct
  source 1..20: mol_type = other DNA
cccaaggggaagtagggaag

SEQ ID NO: 299601 - DNA, 20 bp, synthetic construct
  source 1..20: mol_type = other DNA
ccccaaggggaagtagggaa

SEQ ID NO: 299602 - DNA, 20 bp, synthetic construct
  source 1..20: mol_type = other DNA
gccccaaggggaagtaggga

SEQ ID NO: 299603 - DNA, 20 bp, synthetic construct
  source 1..20: mol_type = other DNA
agccccaaggggaagtaggg

SEQ ID NO: 299604 - DNA, 20 bp, synthetic construct
  source 1..20: mol_type = other DNA
gagccccaaggggaagtagg

SEQ ID NO: 299605 - DNA, 20 bp, synthetic construct
  source 1..20: mol_type = other DNA
ggagccccaaggggaagtag

SEQ ID NO: 299606 - DNA, 20 bp, synthetic construct
  source 1..20: mol_type = other DNA
gggagccccaaggggaagta

SEQ ID NO: 299607 - DNA, 20 bp, synthetic construct
  source 1..20: mol_type = other DNA
agggagccccaaggggaagt

SEQ ID NO: 299608 - DNA, 20 bp, synthetic construct
  source 1..20: mol_type = other DNA
cagggagccccaaggggaag

SEQ ID NO: 299609 - DNA, 20 bp, synthetic construct
  source 1..20: mol_type = other DNA
acagggagccccaaggggaa

SEQ ID NO: 299610 - DNA, 20 bp, synthetic construct
  source 1..20: mol_type = other DNA
cacagggagccccaagggga

SEQ ID NO: 299611 - DNA, 20 bp, synthetic construct
  source 1..20: mol_type = other DNA
acacagggagccccaagggg

SEQ ID NO: 299612 - DNA, 20 bp, synthetic construct
  source 1..20: mol_type = other DNA
gacacagggagccccaaggg

SEQ ID NO: 299613 - DNA, 20 bp, synthetic construct
  source 1..20: mol_type = other DNA
tgacacagggagccccaagg

SEQ ID NO: 299614 - DNA, 20 bp, synthetic construct
  source 1..20: mol_type = other DNA
ctgacacagggagccccaag

SEQ ID NO: 299615 - DNA, 20 bp, synthetic construct
  source 1..20: mol_type = other DNA
cctgacacagggagccccaa

SEQ ID NO: 299616 - DNA, 20 bp, synthetic construct
  source 1..20: mol_type = other DNA
ccctgacacagggagcccca

SEQ ID NO: 299617 - DNA, 20 bp, synthetic construct
  source 1..20: mol_type = other DNA
gccctgacacagggagcccc

SEQ ID NO: 299618 - DNA, 20 bp, synthetic construct
  source 1..20: mol_type = other DNA
tgccctgacacagggagccc

SEQ ID NO: 299619 - DNA, 20 bp, synthetic construct
  source 1..20: mol_type = other DNA
gtgccctgacacagggagcc

SEQ ID NO: 299620 - DNA, 20 bp, synthetic construct
  source 1..20: mol_type = other DNA
tgtgccctgacacagggagc

SEQ ID NO: 299621 - DNA, 20 bp, synthetic construct
  source 1..20: mol_type = other DNA
ctgtgccctgacacagggag

SEQ ID NO: 299622 - DNA, 20 bp, synthetic construct
  source 1..20: mol_type = other DNA
tctgtgccctgacacaggga

SEQ ID NO: 299623 - DNA, 20 bp, synthetic construct
  source 1..20: mol_type = other DNA
gtctgtgccctgacacaggg

SEQ ID NO: 299624 - DNA, 20 bp, synthetic construct
  source 1..20: mol_type = other DNA
agtctgtgccctgacacagg

SEQ ID NO: 299625 - DNA, 20 bp, synthetic construct
  source 1..20: mol_type = other DNA
tagtctgtgccctgacacag

SEQ ID NO: 299626 - DNA, 20 bp, synthetic construct
  source 1..20: mol_type = other DNA
ctagtctgtgccctgacaca

SEQ ID NO: 299627 - DNA, 20 bp, synthetic construct
  source 1..20: mol_type = other DNA
cctagtctgtgccctgacac

SEQ ID NO: 299628 - DNA, 20 bp, synthetic construct
  source 1..20: mol_type = other DNA
acctagtctgtgccctgaca

SEQ ID NO: 299629 - DNA, 20 bp, synthetic construct
  source 1..20: mol_type = other DNA
gacctagtctgtgccctgac

SEQ ID NO: 299630 - DNA, 20 bp, synthetic construct
  source 1..20: mol_type = other DNA
agacctagtctgtgccctga

SEQ ID NO: 299631 - DNA, 20 bp, synthetic construct
  source 1..20: mol_type = other DNA
aagacctagtctgtgccctg

SEQ ID NO: 299632 - DNA, 20 bp, synthetic construct
  source 1..20: mol_type = other DNA
caagacctagtctgtgccct

SEQ ID NO: 299633 - DNA, 20 bp, synthetic construct
  source 1..20: mol_type = other DNA
acaagacctagtctgtgccc

SEQ ID NO: 299634 - DNA, 20 bp, synthetic construct
  source 1..20: mol_type = other DNA
cacaagacctagtctgtgcc

SEQ ID NO: 299635 - DNA, 20 bp, synthetic construct
  source 1..20: mol_type = other DNA
ccacaagacctagtctgtgc

SEQ ID NO: 299636 - DNA, 20 bp, synthetic construct
  source 1..20: mol_type = other DNA
gccacaagacctagtctgtg

SEQ ID NO: 299637 - DNA, 20 bp, synthetic construct
  source 1..20: mol_type = other DNA
agccacaagacctagtctgt

SEQ ID NO: 299638 - DNA, 20 bp, synthetic construct
  source 1..20: mol_type = other DNA
cagccacaagacctagtctg

SEQ ID NO: 299639 - DNA, 20 bp, synthetic construct
  source 1..20: mol_type = other DNA
ccagccacaagacctagtct

SEQ ID NO: 299640 - DNA, 20 bp, synthetic construct
  source 1..20: mol_type = other DNA
accagccacaagacctagtc

SEQ ID NO: 299641 - DNA, 20 bp, synthetic construct
  source 1..20: mol_type = other DNA
gaccagccacaagacctagt

SEQ ID NO: 299642 - DNA, 20 bp, synthetic construct
  source 1..20: mol_type = other DNA
agaccagccacaagacctag

SEQ ID NO: 299643 - DNA, 20 bp, synthetic construct
  source 1..20: mol_type = other DNA
cagaccagccacaagaccta

SEQ ID NO: 299644 - DNA, 20 bp, synthetic construct
  source 1..20: mol_type = other DNA
ccagaccagccacaagacct

SEQ ID NO: 299645 - DNA, 20 bp, synthetic construct
  source 1..20: mol_type = other DNA
gccagaccagccacaagacc

SEQ ID NO: 299646 - DNA, 20 bp, synthetic construct
  source 1..20: mol_type = other DNA
agccagaccagccacaagac

SEQ ID NO: 299647 - DNA, 20 bp, synthetic construct
  source 1..20: mol_type = other DNA
aagccagaccagccacaaga

SEQ ID NO: 299648 - DNA, 20 bp, synthetic construct
  source 1..20: mol_type = other DNA
caagccagaccagccacaag

SEQ ID NO: 299649 - DNA, 20 bp, synthetic construct
  source 1..20: mol_type = other DNA
gcaagccagaccagccacaa

SEQ ID NO: 299650 - DNA, 20 bp, synthetic construct
  source 1..20: mol_type = other DNA
cgcaagccagaccagccaca

SEQ ID NO: 299651 - DNA, 20 bp, synthetic construct
  source 1..20: mol_type = other DNA
ccgcaagccagaccagccac

SEQ ID NO: 299652 - DNA, 20 bp, synthetic construct
  source 1..20: mol_type = other DNA
gccgcaagccagaccagcca

SEQ ID NO: 299653 - DNA, 20 bp, synthetic construct
  source 1..20: mol_type = other DNA
cgccgcaagccagaccagcc

SEQ ID NO: 299654 - DNA, 20 bp, synthetic construct
  source 1..20: mol_type = other DNA
gcgccgcaagccagaccagc

SEQ ID NO: 299655 - DNA, 20 bp, synthetic construct
  source 1..20: mol_type = other DNA
cgcgccgcaagccagaccag

SEQ ID NO: 299656 - DNA, 20 bp, synthetic construct
  source 1..20: mol_type = other DNA
tcgcgccgcaagccagacca

SEQ ID NO: 299657 - DNA, 20 bp, synthetic construct
  source 1..20: mol_type = other DNA
ctcgcgccgcaagccagacc

SEQ ID NO: 299658 - DNA, 20 bp, synthetic construct
  source 1..20: mol_type = other DNA
cctcgcgccgcaagccagac

SEQ ID NO: 299659 - DNA, 20 bp, synthetic construct
  source 1..20: mol_type = other DNA
tcctcgcgccgcaagccaga

SEQ ID NO: 299660 - DNA, 20 bp, synthetic construct
  source 1..20: mol_type = other DNA
atcctcgcgccgcaagccag

SEQ ID NO: 299661 - DNA, 20 bp, synthetic construct
  source 1..20: mol_type = other DNA
catcctcgcgccgcaagcca

SEQ ID NO: 299662 - DNA, 20 bp, synthetic construct
  source 1..20: mol_type = other DNA
ccatcctcgcgccgcaagcc

SEQ ID NO: 299663 - DNA, 20 bp, synthetic construct
  source 1..20: mol_type = other DNA
accatcctcgcgccgcaagc

SEQ ID NO: 299664 - DNA, 20 bp, synthetic construct
  source 1..20: mol_type = other DNA
aaccatcctcgcgccgcaag

SEQ ID NO: 299665 - DNA, 20 bp, synthetic construct
  source 1..20: mol_type = other DNA
gaaccatcctcgcgccgcaa

SEQ ID NO: 299666 - DNA, 20 bp, synthetic construct
  source 1..20: mol_type = other DNA
agaaccatcctcgcgccgca

SEQ ID NO: 299667 - DNA, 20 bp, synthetic construct
  source 1..20: mol_type = other DNA
gagaaccatcctcgcgccgc

SEQ ID NO: 299668 - DNA, 20 bp, synthetic construct
  source 1..20: mol_type = other DNA
agagaaccatcctcgcgccg

SEQ ID NO: 299669 - DNA, 20 bp, synthetic construct
  source 1..20: mol_type = other DNA
gagagaaccatcctcgcgcc

SEQ ID NO: 299670 - DNA, 20 bp, synthetic construct
  source 1..20: mol_type = other DNA
agagagaaccatcctcgcgc

SEQ ID NO: 299671 - DNA, 20 bp, synthetic construct
  source 1..20: mol_type = other DNA
cagagagaaccatcctcgcg

SEQ ID NO: 299672 - DNA, 20 bp, synthetic construct
  source 1..20: mol_type = other DNA
ccagagagaaccatcctcgc

SEQ ID NO: 299673 - DNA, 20 bp, synthetic construct
  source 1..20: mol_type = other DNA
accagagagaaccatcctcg

SEQ ID NO: 299674 - DNA, 20 bp, synthetic construct
  source 1..20: mol_type = other DNA
gaccagagagaaccatcctc

SEQ ID NO: 299675 - DNA, 20 bp, synthetic construct
  source 1..20: mol_type = other DNA
tgaccagagagaaccatcct

SEQ ID NO: 299676 - DNA, 20 bp, synthetic construct
  source 1..20: mol_type = other DNA
atgaccagagagaaccatcc

SEQ ID NO: 299677 - DNA, 20 bp, synthetic construct
  source 1..20: mol_type = other DNA
tatgaccagagagaaccatc

SEQ ID NO: 299678 - DNA, 20 bp, synthetic construct
  source 1..20: mol_type = other DNA
ctatgaccagagagaaccat

SEQ ID NO: 299679 - DNA, 20 bp, synthetic construct
  source 1..20: mol_type = other DNA
gctatgaccagagagaacca

SEQ ID NO: 299680 - DNA, 20 bp, synthetic construct
  source 1..20: mol_type = other DNA
ggctatgaccagagagaacc

SEQ ID NO: 299681 - DNA, 20 bp, synthetic construct
  source 1..20: mol_type = other DNA
gggctatgaccagagagaac

SEQ ID NO: 299682 - DNA, 20 bp, synthetic construct
  source 1..20: mol_type = other DNA
cgggctatgaccagagagaa

SEQ ID NO: 299683 - DNA, 20 bp, synthetic construct
  source 1..20: mol_type = other DNA
tcgggctatgaccagagaga

SEQ ID NO: 299684 - DNA, 20 bp, synthetic construct
  source 1..20: mol_type = other DNA
ttcgggctatgaccagagag

SEQ ID NO: 299685 - DNA, 20 bp, synthetic construct
  source 1..20: mol_type = other DNA
cttcgggctatgaccagaga

SEQ ID NO: 299686 - DNA, 20 bp, synthetic construct
  source 1..20: mol_type = other DNA
acttcgggctatgaccagag

SEQ ID NO: 299687 - DNA, 20 bp, synthetic construct
  source 1..20: mol_type = other DNA
gacttcgggctatgaccaga

SEQ ID NO: 299688 - DNA, 20 bp, synthetic construct
  source 1..20: mol_type = other DNA
agacttcgggctatgaccag

SEQ ID NO: 299689 - DNA, 20 bp, synthetic construct
  source 1..20: mol_type = other DNA
gagacttcgggctatgacca

SEQ ID NO: 299690 - DNA, 20 bp, synthetic construct
  source 1..20: mol_type = other DNA
tgagacttcgggctatgacc

SEQ ID NO: 299691 - DNA, 20 bp, synthetic construct
  source 1..20: mol_type = other DNA
atgagacttcgggctatgac

SEQ ID NO: 299692 - DNA, 20 bp, synthetic construct
  source 1..20: mol_type = other DNA
catgagacttcgggctatga

SEQ ID NO: 299693 - DNA, 20 bp, synthetic construct
  source 1..20: mol_type = other DNA
ccatgagacttcgggctatg

SEQ ID NO: 299694 - DNA, 20 bp, synthetic construct
  source 1..20: mol_type = other DNA
gccatgagacttcgggctat

SEQ ID NO: 299695 - DNA, 20 bp, synthetic construct
  source 1..20: mol_type = other DNA
tgccatgagacttcgggcta

SEQ ID NO: 299696 - DNA, 20 bp, synthetic construct
  source 1..20: mol_type = other DNA
ctgccatgagacttcgggct

SEQ ID NO: 299697 - DNA, 20 bp, synthetic construct
  source 1..20: mol_type = other DNA
actgccatgagacttcgggc

SEQ ID NO: 299698 - DNA, 20 bp, synthetic construct
  source 1..20: mol_type = other DNA
gactgccatgagacttcggg

SEQ ID NO: 299699 - DNA, 20 bp, synthetic construct
  source 1..20: mol_type = other DNA
ggactgccatgagacttcgg

SEQ ID NO: 299700 - DNA, 20 bp, synthetic construct
  source 1..20: mol_type = other DNA
gggactgccatgagacttcg

SEQ ID NO: 299701 - DNA, 20 bp, synthetic construct
  source 1..20: mol_type = other DNA
tgggactgccatgagacttc

SEQ ID NO: 299702 - DNA, 20 bp, synthetic construct
  source 1..20: mol_type = other DNA
ttgggactgccatgagactt

SEQ ID NO: 299703 - DNA, 20 bp, synthetic construct
  source 1..20: mol_type = other DNA
tttgggactgccatgagact

SEQ ID NO: 299704 - DNA, 20 bp, synthetic construct
  source 1..20: mol_type = other DNA
ctttgggactgccatgagac

SEQ ID NO: 299705 - DNA, 20 bp, synthetic construct
  source 1..20: mol_type = other DNA
cctttgggactgccatgaga

SEQ ID NO: 299706 - DNA, 20 bp, synthetic construct
  source 1..20: mol_type = other DNA
tcctttgggactgccatgag

SEQ ID NO: 299707 - DNA, 20 bp, synthetic construct
  source 1..20: mol_type = other DNA
ctcctttgggactgccatga

SEQ ID NO: 299708 - DNA, 20 bp, synthetic construct
  source 1..20: mol_type = other DNA
cctcctttgggactgccatg

SEQ ID NO: 299709 - DNA, 20 bp, synthetic construct
  source 1..20: mol_type = other DNA
gcctcctttgggactgccat

SEQ ID NO: 299710 - DNA, 20 bp, synthetic construct
  source 1..20: mol_type = other DNA
agcctcctttgggactgcca

SEQ ID NO: 299711 - DNA, 20 bp, synthetic construct
  source 1..20: mol_type = other DNA
aagcctcctttgggactgcc

SEQ ID NO: 299712 - DNA, 20 bp, synthetic construct
  source 1..20: mol_type = other DNA
taagcctcctttgggactgc

SEQ ID NO: 299713 - DNA, 20 bp, synthetic construct
  source 1..20: mol_type = other DNA
gtaagcctcctttgggactg

SEQ ID NO: 299714 - DNA, 20 bp, synthetic construct
  source 1..20: mol_type = other DNA
tgtaagcctcctttgggact

SEQ ID NO: 299715 - DNA, 20 bp, synthetic construct
  source 1..20: mol_type = other DNA
ttgtaagcctcctttgggac

SEQ ID NO: 299716 - DNA, 20 bp, synthetic construct
  source 1..20: mol_type = other DNA
gttgtaagcctcctttggga

SEQ ID NO: 299717 - DNA, 20 bp, synthetic construct
  source 1..20: mol_type = other DNA
agttgtaagcctcctttggg

SEQ ID NO: 299718 - DNA, 20 bp, synthetic construct
  source 1..20: mol_type = other DNA
gagttgtaagcctcctttgg

SEQ ID NO: 299719 - DNA, 20 bp, synthetic construct
  source 1..20: mol_type = other DNA
ggagttgtaagcctcctttg

SEQ ID NO: 299720 - DNA, 20 bp, synthetic construct
  source 1..20: mol_type = other DNA
aggagttgtaagcctccttt

SEQ ID NO: 299721 - DNA, 20 bp, synthetic construct
  source 1..20: mol_type = other DNA
caggagttgtaagcctcctt

SEQ ID NO: 299722 - DNA, 20 bp, synthetic construct
  source 1..20: mol_type = other DNA
gcaggagttgtaagcctcct

SEQ ID NO: 299723 - DNA, 20 bp, synthetic construct
  source 1..20: mol_type = other DNA
tgcaggagttgtaagcctcc

SEQ ID NO: 299724 - DNA, 20 bp, synthetic construct
  source 1..20: mol_type = other DNA
atgcaggagttgtaagcctc

SEQ ID NO: 299725 - DNA, 20 bp, synthetic construct
  source 1..20: mol_type = other DNA
gatgcaggagttgtaagcct

SEQ ID NO: 299726 - DNA, 20 bp, synthetic construct
  source 1..20: mol_type = other DNA
tgatgcaggagttgtaagcc

SEQ ID NO: 299727 - DNA, 20 bp, synthetic construct
  source 1..20: mol_type = other DNA
gtgatgcaggagttgtaagc

SEQ ID NO: 299728 - DNA, 20 bp, synthetic construct
  source 1..20: mol_type = other DNA
tgtgatgcaggagttgtaag

SEQ ID NO: 299729 - DNA, 20 bp, synthetic construct
  source 1..20: mol_type = other DNA
ttgtgatgcaggagttgtaa

SEQ ID NO: 299730 - DNA, 20 bp, synthetic construct
  source 1..20: mol_type = other DNA
cttgtgatgcaggagttgta

SEQ ID NO: 299731 - DNA, 20 bp, synthetic construct
  source 1..20: mol_type = other DNA
tcttgtgatgcaggagttgt

SEQ ID NO: 299732 - DNA, 20 bp, synthetic construct
  source 1..20: mol_type = other DNA
ttcttgtgatgcaggagttg

SEQ ID NO: 299733 - DNA, 20 bp, synthetic construct
  source 1..20: mol_type = other DNA
tttcttgtgatgcaggagtt

SEQ ID NO: 299734 - DNA, 20 bp, synthetic construct
  source 1..20: mol_type = other DNA
ttttcttgtgatgcaggagt

SEQ ID NO: 299735 - DNA, 20 bp, synthetic construct
  source 1..20: mol_type = other DNA
tttttcttgtgatgcaggag

SEQ ID NO: 299736 - DNA, 20 bp, synthetic construct
  source 1..20: mol_type = other DNA
ctttttcttgtgatgcagga

SEQ ID NO: 299737 - DNA, 20 bp, synthetic construct
  source 1..20: mol_type = other DNA
cctttttcttgtgatgcagg

SEQ ID NO: 299738 - DNA, 20 bp, synthetic construct
  source 1..20: mol_type = other DNA
tcctttttcttgtgatgcag

SEQ ID NO: 299739 - DNA, 20 bp, synthetic construct
  source 1..20: mol_type = other DNA
ttcctttttcttgtgatgca

SEQ ID NO: 299740 - DNA, 20 bp, synthetic construct
  source 1..20: mol_type = other DNA
cttcctttttcttgtgatgc

SEQ ID NO: 299741 - DNA, 20 bp, synthetic construct
  source 1..20: mol_type = other DNA
gcttcctttttcttgtgatg

SEQ ID NO: 299742 - DNA, 20 bp, synthetic construct
  source 1..20: mol_type = other DNA
ggcttcctttttcttgtgat

SEQ ID NO: 299743 - DNA, 20 bp, synthetic construct
  source 1..20: mol_type = other DNA
tggcttcctttttcttgtga

SEQ ID NO: 299744 - DNA, 20 bp, synthetic construct
  source 1..20: mol_type = other DNA
gtggcttcctttttcttgtg

SEQ ID NO: 299745 - DNA, 20 bp, synthetic construct
  source 1..20: mol_type = other DNA
agtggcttcctttttcttgt

SEQ ID NO: 299746 - DNA, 20 bp, synthetic construct
  source 1..20: mol_type = other DNA
cagtggcttcctttttcttg

SEQ ID NO: 299747 - DNA, 20 bp, synthetic construct
  source 1..20: mol_type = other DNA
gcagtggcttcctttttctt

SEQ ID NO: 299748 - DNA, 20 bp, synthetic construct
  source 1..20: mol_type = other DNA
ggcagtggcttcctttttct

SEQ ID NO: 299749 - DNA, 20 bp, synthetic construct
  source 1..20: mol_type = other DNA
tggcagtggcttcctttttc

SEQ ID NO: 299750 - DNA, 20 bp, synthetic construct
  source 1..20: mol_type = other DNA
ctggcagtggcttccttttt

SEQ ID NO: 299751 - DNA, 20 bp, synthetic construct
  source 1..20: mol_type = other DNA
gctggcagtggcttcctttt

SEQ ID NO: 299752 - DNA, 20 bp, synthetic construct
  source 1..20: mol_type = other DNA
agctggcagtggcttccttt

SEQ ID NO: 299753 - DNA, 20 bp, synthetic construct
  source 1..20: mol_type = other DNA
cagctggcagtggcttcctt

SEQ ID NO: 299754 - DNA, 20 bp, synthetic construct
  source 1..20: mol_type = other DNA
ccagctggcagtggcttcct

SEQ ID NO: 299755 - DNA, 20 bp, synthetic construct
  source 1..20: mol_type = other DNA
cccagctggcagtggcttcc

SEQ ID NO: 299756 - DNA, 20 bp, synthetic construct
  source 1..20: mol_type = other DNA
ccccagctggcagtggcttc

SEQ ID NO: 299757 - DNA, 20 bp, synthetic construct
  source 1..20: mol_type = other DNA
cccccagctggcagtggctt

SEQ ID NO: 299758 - DNA, 20 bp, synthetic construct
  source 1..20: mol_type = other DNA
ccccccagctggcagtggct

SEQ ID NO: 299759 - DNA, 20 bp, synthetic construct
  source 1..20: mol_type = other DNA
tccccccagctggcagtggc

SEQ ID NO: 299760 - DNA, 20 bp, synthetic construct
  source 1..20: mol_type = other DNA
atccccccagctggcagtgg

SEQ ID NO: 299761 - DNA, 20 bp, synthetic construct
  source 1..20: mol_type = other DNA
gatccccccagctggcagtg

SEQ ID NO: 299762 - DNA, 20 bp, synthetic construct
  source 1..20: mol_type = other DNA
agatccccccagctggcagt

SEQ ID NO: 299763 - DNA, 20 bp, synthetic construct
  source 1..20: mol_type = other DNA
cagatccccccagctggcag

SEQ ID NO: 299764 - DNA, 20 bp, synthetic construct
  source 1..20: mol_type = other DNA
gcagatccccccagctggca

SEQ ID NO: 299765 - DNA, 20 bp, synthetic construct
  source 1..20: mol_type = other DNA
tgcagatccccccagctggc

SEQ ID NO: 299766 - DNA, 20 bp, synthetic construct
  source 1..20: mol_type = other DNA
ctgcagatccccccagctgg

SEQ ID NO: 299767 - DNA, 20 bp, synthetic construct
  source 1..20: mol_type = other DNA
gctgcagatccccccagctg

SEQ ID NO: 299768 - DNA, 20 bp, synthetic construct
  source 1..20: mol_type = other DNA
agctgcagatccccccagct

SEQ ID NO: 299769 - DNA, 20 bp, synthetic construct
  source 1..20: mol_type = other DNA
gagctgcagatccccccagc

SEQ ID NO: 299770 - DNA, 20 bp, synthetic construct
  source 1..20: mol_type = other DNA
ggagctgcagatccccccag

SEQ ID NO: 299771 - DNA, 20 bp, synthetic construct
  source 1..20: mol_type = other DNA
gggagctgcagatcccccca

SEQ ID NO: 299772 - DNA, 20 bp, synthetic construct
  source 1..20: mol_type = other DNA
tgggagctgcagatcccccc

SEQ ID NO: 299773 - DNA, 20 bp, synthetic construct
  source 1..20: mol_type = other DNA
ctgggagctgcagatccccc

SEQ ID NO: 299774 - DNA, 20 bp, synthetic construct
  source 1..20: mol_type = other DNA
tctgggagctgcagatcccc

SEQ ID NO: 299775 - DNA, 20 bp, synthetic construct
  source 1..20: mol_type = other DNA
ttctgggagctgcagatccc

SEQ ID NO: 299776 - DNA, 20 bp, synthetic construct
  source 1..20: mol_type = other DNA
cttctgggagctgcagatcc

SEQ ID NO: 299777 - DNA, 20 bp, synthetic construct
  source 1..20: mol_type = other DNA
gcttctgggagctgcagatc

SEQ ID NO: 299778 - DNA, 20 bp, synthetic construct
  source 1..20: mol_type = other DNA
agcttctgggagctgcagat

SEQ ID NO: 299779 - DNA, 20 bp, synthetic construct
  source 1..20: mol_type = other DNA
gagcttctgggagctgcaga

SEQ ID NO: 299780 - DNA, 20 bp, synthetic construct
  source 1..20: mol_type = other DNA
ggagcttctgggagctgcag

SEQ ID NO: 299781 - DNA, 20 bp, synthetic construct
  source 1..20: mol_type = other DNA
cggagcttctgggagctgca

SEQ ID NO: 299782 - DNA, 20 bp, synthetic construct
  source 1..20: mol_type = other DNA
acggagcttctgggagctgc

SEQ ID NO: 299783 - DNA, 20 bp, synthetic construct
  source 1..20: mol_type = other DNA
cacggagcttctgggagctg

SEQ ID NO: 299784 - DNA, 20 bp, synthetic construct
  source 1..20: mol_type = other DNA
tcacggagcttctgggagct

SEQ ID NO: 299785 - DNA, 20 bp, synthetic construct
  source 1..20: mol_type = other DNA
ctcacggagcttctgggagc

SEQ ID NO: 299786 - DNA, 20 bp, synthetic construct
  source 1..20: mol_type = other DNA
gctcacggagcttctgggag

SEQ ID NO: 299787 - DNA, 20 bp, synthetic construct
  source 1..20: mol_type = other DNA
ggctcacggagcttctggga

SEQ ID NO: 299788 - DNA, 20 bp, synthetic construct
  source 1..20: mol_type = other DNA
aggctcacggagcttctggg

SEQ ID NO: 299789 - DNA, 20 bp, synthetic construct
  source 1..20: mol_type = other DNA
gaggctcacggagcttctgg

SEQ ID NO: 299790 - DNA, 20 bp, synthetic construct
  source 1..20: mol_type = other DNA
tgaggctcacggagcttctg

SEQ ID NO: 299791 - DNA, 20 bp, synthetic construct
  source 1..20: mol_type = other DNA
ctgaggctcacggagcttct

SEQ ID NO: 299792 - DNA, 20 bp, synthetic construct
  source 1..20: mol_type = other DNA
gctgaggctcacggagcttc

SEQ ID NO: 299793 - DNA, 20 bp, synthetic construct
  source 1..20: mol_type = other DNA
ggctgaggctcacggagctt

SEQ ID NO: 299794 - DNA, 20 bp, synthetic construct
  source 1..20: mol_type = other DNA
tggctgaggctcacggagct

SEQ ID NO: 299795 - DNA, 20 bp, synthetic construct
  source 1..20: mol_type = other DNA
gtggctgaggctcacggagc

SEQ ID NO: 299796 - DNA, 20 bp, synthetic construct
  source 1..20: mol_type = other DNA
ggtggctgaggctcacggag

SEQ ID NO: 299797 - DNA, 20 bp, synthetic construct
  source 1..20: mol_type = other DNA
gggtggctgaggctcacgga

SEQ ID NO: 299798 - DNA, 20 bp, synthetic construct
  source 1..20: mol_type = other DNA
ggggtggctgaggctcacgg

SEQ ID NO: 299799 - DNA, 20 bp, synthetic construct
  source 1..20: mol_type = other DNA
aggggtggctgaggctcacg

SEQ ID NO: 299800 - DNA, 20 bp, synthetic construct
  source 1..20: mol_type = other DNA
gaggggtggctgaggctcac

SEQ ID NO: 299801 - DNA, 20 bp, synthetic construct
  source 1..20: mol_type = other DNA
tgaggggtggctgaggctca

SEQ ID NO: 299802 - DNA, 20 bp, synthetic construct
  source 1..20: mol_type = other DNA
ctgaggggtggctgaggctc

SEQ ID NO: 299803 - DNA, 20 bp, synthetic construct
  source 1..20: mol_type = other DNA
tctgaggggtggctgaggct

SEQ ID NO: 299804 - DNA, 20 bp, synthetic construct
  source 1..20: mol_type = other DNA
gtctgaggggtggctgaggc

SEQ ID NO: 299805 - DNA, 20 bp, synthetic construct
  source 1..20: mol_type = other DNA
agtctgaggggtggctgagg

SEQ ID NO: 299806 - DNA, 20 bp, synthetic construct
  source 1..20: mol_type = other DNA
cagtctgaggggtggctgag

SEQ ID NO: 299807 - DNA, 20 bp, synthetic construct
  source 1..20: mol_type = other DNA
ccagtctgaggggtggctga

SEQ ID NO: 299808 - DNA, 20 bp, synthetic construct
  source 1..20: mol_type = other DNA
cccagtctgaggggtggctg

SEQ ID NO: 299809 - DNA, 20 bp, synthetic construct
  source 1..20: mol_type = other DNA
acccagtctgaggggtggct

SEQ ID NO: 299810 - DNA, 20 bp, synthetic construct
  source 1..20: mol_type = other DNA
aacccagtctgaggggtggc

SEQ ID NO: 299811 - DNA, 20 bp, synthetic construct
  source 1..20: mol_type = other DNA
gaacccagtctgaggggtgg

SEQ ID NO: 299812 - DNA, 20 bp, synthetic construct
  source 1..20: mol_type = other DNA
ggaacccagtctgaggggtg

SEQ ID NO: 299813 - DNA, 20 bp, synthetic construct
  source 1..20: mol_type = other DNA
aggaacccagtctgaggggt

SEQ ID NO: 299814 - DNA, 20 bp, synthetic construct
  source 1..20: mol_type = other DNA
gaggaacccagtctgagggg

SEQ ID NO: 299815 - DNA, 20 bp, synthetic construct
  source 1..20: mol_type = other DNA
agaggaacccagtctgaggg

SEQ ID NO: 299816 - DNA, 20 bp, synthetic construct
  source 1..20: mol_type = other DNA
gagaggaacccagtctgagg

SEQ ID NO: 299817 - DNA, 20 bp, synthetic construct
  source 1..20: mol_type = other DNA
ggagaggaacccagtctgag

SEQ ID NO: 299818 - DNA, 20 bp, synthetic construct
  source 1..20: mol_type = other DNA
tggagaggaacccagtctga

SEQ ID NO: 299819 - DNA, 20 bp, synthetic construct
  source 1..20: mol_type = other DNA
ttggagaggaacccagtctg

SEQ ID NO: 299820 - DNA, 20 bp, synthetic construct
  source 1..20: mol_type = other DNA
cttggagaggaacccagtct

SEQ ID NO: 299821 - DNA, 20 bp, synthetic construct
  source 1..20: mol_type = other DNA
gcttggagaggaacccagtc

SEQ ID NO: 299822 - DNA, 20 bp, synthetic construct
  source 1..20: mol_type = other DNA
agcttggagaggaacccagt

SEQ ID NO: 299823 - DNA, 20 bp, synthetic construct
  source 1..20: mol_type = other DNA
gagcttggagaggaacccag

SEQ ID NO: 299824 - DNA, 20 bp, synthetic construct
  source 1..20: mol_type = other DNA
cgagcttggagaggaaccca

SEQ ID NO: 299825 - DNA, 20 bp, synthetic construct
  source 1..20: mol_type = other DNA
gcgagcttggagaggaaccc

SEQ ID NO: 299826 - DNA, 20 bp, synthetic construct
  source 1..20: mol_type = other DNA
ggcgagcttggagaggaacc

SEQ ID NO: 299827 - DNA, 20 bp, synthetic construct
  source 1..20: mol_type = other DNA
gggcgagcttggagaggaac

SEQ ID NO: 299828 - DNA, 20 bp, synthetic construct
  source 1..20: mol_type = other DNA
agggcgagcttggagaggaa

SEQ ID NO: 299829 - DNA, 20 bp, synthetic construct
  source 1..20: mol_type = other DNA
gagggcgagcttggagagga

SEQ ID NO: 299830 - DNA, 20 bp, synthetic construct
  source 1..20: mol_type = other DNA
agagggcgagcttggagagg

SEQ ID NO: 299831 - DNA, 20 bp, synthetic construct
  source 1..20: mol_type = other DNA
cagagggcgagcttggagag

SEQ ID NO: 299832 - DNA, 20 bp, synthetic construct
  source 1..20: mol_type = other DNA
ccagagggcgagcttggaga

SEQ ID NO: 299833 - DNA, 20 bp, synthetic construct
  source 1..20: mol_type = other DNA
tccagagggcgagcttggag

SEQ ID NO: 299834 - DNA, 20 bp, synthetic construct
  source 1..20: mol_type = other DNA
ctccagagggcgagcttgga

SEQ ID NO: 299835 - DNA, 20 bp, synthetic construct
  source 1..20: mol_type = other DNA
cctccagagggcgagcttgg

SEQ ID NO: 299836 - DNA, 20 bp, synthetic construct
  source 1..20: mol_type = other DNA
ccctccagagggcgagcttg

SEQ ID NO: 299837 - DNA, 20 bp, synthetic construct
  source 1..20: mol_type = other DNA
cccctccagagggcgagctt

SEQ ID NO: 299838 - DNA, 20 bp, synthetic construct
  source 1..20: mol_type = other DNA
gcccctccagagggcgagct

SEQ ID NO: 299839 - DNA, 20 bp, synthetic construct
  source 1..20: mol_type = other DNA
tgcccctccagagggcgagc

SEQ ID NO: 299840 - DNA, 20 bp, synthetic construct
  source 1..20: mol_type = other DNA
ctgcccctccagagggcgag

SEQ ID NO: 299841 - DNA, 20 bp, synthetic construct
  source 1..20: mol_type = other DNA
gctgcccctccagagggcga

SEQ ID NO: 299842 - DNA, 20 bp, synthetic construct
  source 1..20: mol_type = other DNA
cgctgcccctccagagggcg

SEQ ID NO: 299843 - DNA, 20 bp, synthetic construct
  source 1..20: mol_type = other DNA
gcgctgcccctccagagggc

SEQ ID NO: 299844 - DNA, 20 bp, synthetic construct
  source 1..20: mol_type = other DNA
tgcgctgcccctccagaggg

SEQ ID NO: 299845 - DNA, 20 bp, synthetic construct
  source 1..20: mol_type = other DNA
ctgcgctgcccctccagagg

SEQ ID NO: 299846 - DNA, 20 bp, synthetic construct
  source 1..20: mol_type = other DNA
gctgcgctgcccctccagag

SEQ ID NO: 299847 - DNA, 20 bp, synthetic construct
  source 1..20: mol_type = other DNA
ggctgcgctgcccctccaga

SEQ ID NO: 299848 - DNA, 20 bp, synthetic construct
  source 1..20: mol_type = other DNA
aggctgcgctgcccctccag

SEQ ID NO: 299849 - DNA, 20 bp, synthetic construct
  source 1..20: mol_type = other DNA
gaggctgcgctgcccctcca

SEQ ID NO: 299850 - DNA, 20 bp, synthetic construct
  source 1..20: mol_type = other DNA
ggaggctgcgctgcccctcc

SEQ ID NO: 299851 - DNA, 20 bp, synthetic construct
  source 1..20: mol_type = other DNA
gggaggctgcgctgcccctc

SEQ ID NO: 299852 - DNA, 20 bp, synthetic construct
  source 1..20: mol_type = other DNA
tgggaggctgcgctgcccct

SEQ ID NO: 299853 - DNA, 20 bp, synthetic construct
  source 1..20: mol_type = other DNA
gtgggaggctgcgctgcccc

SEQ ID NO: 299854 - DNA, 20 bp, synthetic construct
  source 1..20: mol_type = other DNA
ggtgggaggctgcgctgccc

SEQ ID NO: 299855 - DNA, 20 bp, synthetic construct
  source 1..20: mol_type = other DNA
tggtgggaggctgcgctgcc

SEQ ID NO: 299856 - DNA, 20 bp, synthetic construct
  source 1..20: mol_type = other DNA
ttggtgggaggctgcgctgc

SEQ ID NO: 299857 - DNA, 20 bp, synthetic construct
  source 1..20: mol_type = other DNA
cttggtgggaggctgcgctg

SEQ ID NO: 299858 - DNA, 20 bp, synthetic construct
  source 1..20: mol_type = other DNA
ccttggtgggaggctgcgct

SEQ ID NO: 299859 - DNA, 20 bp, synthetic construct
  source 1..20: mol_type = other DNA
cccttggtgggaggctgcgc

SEQ ID NO: 299860 - DNA, 20 bp, synthetic construct
  source 1..20: mol_type = other DNA
gcccttggtgggaggctgcg

SEQ ID NO: 299861 - DNA, 20 bp, synthetic construct
  source 1..20: mol_type = other DNA
ggcccttggtgggaggctgc

SEQ ID NO: 299862 - DNA, 20 bp, synthetic construct
  source 1..20: mol_type = other DNA
gggcccttggtgggaggctg

SEQ ID NO: 299863 - DNA, 20 bp, synthetic construct
  source 1..20: mol_type = other DNA
agggcccttggtgggaggct

SEQ ID NO: 299864 - DNA, 20 bp, synthetic construct
  source 1..20: mol_type = other DNA
cagggcccttggtgggaggc

SEQ ID NO: 299865 - DNA, 20 bp, synthetic construct
  source 1..20: mol_type = other DNA
gcagggcccttggtgggagg

SEQ ID NO: 299866 - DNA, 20 bp, synthetic construct
  source 1..20: mol_type = other DNA
cgcagggcccttggtgggag

SEQ ID NO: 299867 - DNA, 20 bp, synthetic construct
  source 1..20: mol_type = other DNA
tcgcagggcccttggtggga

SEQ ID NO: 299868 - DNA, 20 bp, synthetic construct
  source 1..20: mol_type = other DNA
gtcgcagggcccttggtggg

SEQ ID NO: 299869 - DNA, 20 bp, synthetic construct
  source 1..20: mol_type = other DNA
ggtcgcagggcccttggtgg

SEQ ID NO: 299870 - DNA, 20 bp, synthetic construct
  source 1..20: mol_type = other DNA
tggtcgcagggcccttggtg

SEQ ID NO: 299871 - DNA, 20 bp, synthetic construct
  source 1..20: mol_type = other DNA
gtggtcgcagggcccttggt

SEQ ID NO: 299872 - DNA, 20 bp, synthetic construct
  source 1..20: mol_type = other DNA
tgtggtcgcagggcccttgg

SEQ ID NO: 299873 - DNA, 20 bp, synthetic construct
  source 1..20: mol_type = other DNA
ctgtggtcgcagggcccttg

SEQ ID NO: 299874 - DNA, 20 bp, synthetic construct
  source 1..20: mol_type = other DNA
gctgtggtcgcagggccctt

SEQ ID NO: 299875 - DNA, 20 bp, synthetic construct
  source 1..20: mol_type = other DNA
tgctgtggtcgcagggccct

SEQ ID NO: 299876 - DNA, 20 bp, synthetic construct
  source 1..20: mol_type = other DNA
ctgctgtggtcgcagggccc

SEQ ID NO: 299877 - DNA, 20 bp, synthetic construct
  source 1..20: mol_type = other DNA
cctgctgtggtcgcagggcc

SEQ ID NO: 299878 - DNA, 20 bp, synthetic construct
  source 1..20: mol_type = other DNA
ccctgctgtggtcgcagggc

SEQ ID NO: 299879 - DNA, 20 bp, synthetic construct
  source 1..20: mol_type = other DNA
tccctgctgtggtcgcaggg

SEQ ID NO: 299880 - DNA, 20 bp, synthetic construct
  source 1..20: mol_type = other DNA
atccctgctgtggtcgcagg

SEQ ID NO: 299881 - DNA, 20 bp, synthetic construct
  source 1..20: mol_type = other DNA
aatccctgctgtggtcgcag

SEQ ID NO: 299882 - DNA, 20 bp, synthetic construct
  source 1..20: mol_type = other DNA
caatccctgctgtggtcgca

SEQ ID NO: 299883 - DNA, 20 bp, synthetic construct
  source 1..20: mol_type = other DNA
ccaatccctgctgtggtcgc

SEQ ID NO: 299884 - DNA, 20 bp, synthetic construct
  source 1..20: mol_type = other DNA
cccaatccctgctgtggtcg

SEQ ID NO: 299885 - DNA, 20 bp, synthetic construct
  source 1..20: mol_type = other DNA
tcccaatccctgctgtggtc

SEQ ID NO: 299886 - DNA, 20 bp, synthetic construct
  source 1..20: mol_type = other DNA
atcccaatccctgctgtggt

SEQ ID NO: 299887 - DNA, 20 bp, synthetic construct
  source 1..20: mol_type = other DNA
catcccaatccctgctgtgg

SEQ ID NO: 299888 - DNA, 20 bp, synthetic construct
  source 1..20: mol_type = other DNA
tcatcccaatccctgctgtg

SEQ ID NO: 299889 - DNA, 20 bp, synthetic construct
  source 1..20: mol_type = other DNA
ttcatcccaatccctgctgt

SEQ ID NO: 299890 - DNA, 20 bp, synthetic construct
  source 1..20: mol_type = other DNA
attcatcccaatccctgctg

SEQ ID NO: 299891 - DNA, 20 bp, synthetic construct
  source 1..20: mol_type = other DNA
aattcatcccaatccctgct

SEQ ID NO: 299892 - DNA, 20 bp, synthetic construct
  source 1..20: mol_type = other DNA
caattcatcccaatccctgc

SEQ ID NO: 299893 - DNA, 20 bp, synthetic construct
  source 1..20: mol_type = other DNA
gcaattcatcccaatccctg

SEQ ID NO: 299894 - DNA, 20 bp, synthetic construct
  source 1..20: mol_type = other DNA
ggcaattcatcccaatccct

SEQ ID NO: 299895 - DNA, 20 bp, synthetic construct
  source 1..20: mol_type = other DNA
aggcaattcatcccaatccc

SEQ ID NO: 299896 - DNA, 20 bp, synthetic construct
  source 1..20: mol_type = other DNA
caggcaattcatcccaatcc

SEQ ID NO: 299897 - DNA, 20 bp, synthetic construct
  source 1..20: mol_type = other DNA
acaggcaattcatcccaatc

SEQ ID NO: 299898 - DNA, 20 bp, synthetic construct
  source 1..20: mol_type = other DNA
gacaggcaattcatcccaat

SEQ ID NO: 299899 - DNA, 20 bp, synthetic construct
  source 1..20: mol_type = other DNA
ggacaggcaattcatcccaa

SEQ ID NO: 299900 - DNA, 20 bp, synthetic construct
  source 1..20: mol_type = other DNA
aggacaggcaattcatccca

SEQ ID NO: 299901 - DNA, 20 bp, synthetic construct
  source 1..20: mol_type = other DNA
caggacaggcaattcatccc

SEQ ID NO: 299902 - DNA, 20 bp, synthetic construct
  source 1..20: mol_type = other DNA
ccaggacaggcaattcatcc

SEQ ID NO: 299903 - DNA, 20 bp, synthetic construct
  source 1..20: mol_type = other DNA
tccaggacaggcaattcatc

SEQ ID NO: 299904 - DNA, 20 bp, synthetic construct
  source 1..20: mol_type = other DNA
atccaggacaggcaattcat

SEQ ID NO: 299905 - DNA, 20 bp, synthetic construct
  source 1..20: mol_type = other DNA
gatccaggacaggcaattca

SEQ ID NO: 299906 - DNA, 20 bp, synthetic construct
  source 1..20: mol_type = other DNA
agatccaggacaggcaattc

SEQ ID NO: 299907 - DNA, 20 bp, synthetic construct
  source 1..20: mol_type = other DNA
cagatccaggacaggcaatt

SEQ ID NO: 299908 - DNA, 20 bp, synthetic construct
  source 1..20: mol_type = other DNA
gcagatccaggacaggcaat

SEQ ID NO: 299909 - DNA, 20 bp, synthetic construct
  source 1..20: mol_type = other DNA
agcagatccaggacaggcaa

SEQ ID NO: 299910 - DNA, 20 bp, synthetic construct
  source 1..20: mol_type = other DNA
gagcagatccaggacaggca

SEQ ID NO: 299911 - DNA, 20 bp, synthetic construct
  source 1..20: mol_type = other DNA
agagcagatccaggacaggc

SEQ ID NO: 299912 - DNA, 20 bp, synthetic construct
  source 1..20: mol_type = other DNA
tagagcagatccaggacagg

SEQ ID NO: 299913 - DNA, 20 bp, synthetic construct
  source 1..20: mol_type = other DNA
ctagagcagatccaggacag

SEQ ID NO: 299914 - DNA, 20 bp, synthetic construct
  source 1..20: mol_type = other DNA
tctagagcagatccaggaca

SEQ ID NO: 299915 - DNA, 20 bp, synthetic construct
  source 1..20: mol_type = other DNA
ctctagagcagatccaggac

SEQ ID NO: 299916 - DNA, 20 bp, synthetic construct
  source 1..20: mol_type = other DNA
cctctagagcagatccagga

SEQ ID NO: 299917 - DNA, 20 bp, synthetic construct
  source 1..20: mol_type = other DNA
gcctctagagcagatccagg

SEQ ID NO: 299918 - DNA, 20 bp, synthetic construct
  source 1..20: mol_type = other DNA
ggcctctagagcagatccag

SEQ ID NO: 299919 - DNA, 20 bp, synthetic construct
  source 1..20: mol_type = other DNA
gggcctctagagcagatcca

SEQ ID NO: 299920 - DNA, 20 bp, synthetic construct
  source 1..20: mol_type = other DNA
tgggcctctagagcagatcc

SEQ ID NO: 299921 - DNA, 20 bp, synthetic construct
  source 1..20: mol_type = other DNA
ttgggcctctagagcagatc

SEQ ID NO: 299922 - DNA, 20 bp, synthetic construct
  source 1..20: mol_type = other DNA
cttgggcctctagagcagat

SEQ ID NO: 299923 - DNA, 20 bp, synthetic construct
  source 1..20: mol_type = other DNA
gcttgggcctctagagcaga

SEQ ID NO: 299924 - DNA, 20 bp, synthetic construct
  source 1..20: mol_type = other DNA
agcttgggcctctagagcag

SEQ ID NO: 299925 - DNA, 20 bp, synthetic construct
  source 1..20: mol_type = other DNA
cagcttgggcctctagagca

SEQ ID NO: 299926 - DNA, 20 bp, synthetic construct
  source 1..20: mol_type = other DNA
gcagcttgggcctctagagc

SEQ ID NO: 299927 - DNA, 20 bp, synthetic construct
  source 1..20: mol_type = other DNA
ggcagcttgggcctctagag

SEQ ID NO: 299928 - DNA, 20 bp, synthetic construct
  source 1..20: mol_type = other DNA
aggcagcttgggcctctaga

SEQ ID NO: 299929 - DNA, 20 bp, synthetic construct
  source 1..20: mol_type = other DNA
caggcagcttgggcctctag

SEQ ID NO: 299930 - DNA, 20 bp, synthetic construct
  source 1..20: mol_type = other DNA
gcaggcagcttgggcctcta

SEQ ID NO: 299931 - DNA, 20 bp, synthetic construct
  source 1..20: mol_type = other DNA
ggcaggcagcttgggcctct

SEQ ID NO: 299932 - DNA, 20 bp, synthetic construct
  source 1..20: mol_type = other DNA
aggcaggcagcttgggcctc

SEQ ID NO: 299933 - DNA, 20 bp, synthetic construct
  source 1..20: mol_type = other DNA
caggcaggcagcttgggcct

SEQ ID NO: 299934 - DNA, 20 bp, synthetic construct
  source 1..20: mol_type = other DNA
tcaggcaggcagcttgggcc

SEQ ID NO: 299935 - DNA, 20 bp, synthetic construct
  source 1..20: mol_type = other DNA
ctcaggcaggcagcttgggc

SEQ ID NO: 299936 - DNA, 20 bp, synthetic construct
  source 1..20: mol_type = other DNA
cctcaggcaggcagcttggg

SEQ ID NO: 299937 - DNA, 20 bp, synthetic construct
  source 1..20: mol_type = other DNA
tcctcaggcaggcagcttgg

SEQ ID NO: 299938 - DNA, 20 bp, synthetic construct
  source 1..20: mol_type = other DNA
ttcctcaggcaggcagcttg

SEQ ID NO: 299939 - DNA, 20 bp, synthetic construct
  source 1..20: mol_type = other DNA
cttcctcaggcaggcagctt

SEQ ID NO: 299940 - DNA, 20 bp, synthetic construct
  source 1..20: mol_type = other DNA
ccttcctcaggcaggcagct

SEQ ID NO: 299941 - DNA, 20 bp, synthetic construct
  source 1..20: mol_type = other DNA
tccttcctcaggcaggcagc

SEQ ID NO: 299942 - DNA, 20 bp, synthetic construct
  source 1..20: mol_type = other DNA
atccttcctcaggcaggcag

SEQ ID NO: 299943 - DNA, 20 bp, synthetic construct
  source 1..20: mol_type = other DNA
catccttcctcaggcaggca

SEQ ID NO: 299944 - DNA, 20 bp, synthetic construct
  source 1..20: mol_type = other DNA
tcatccttcctcaggcaggc

SEQ ID NO: 299945 - DNA, 20 bp, synthetic construct
  source 1..20: mol_type = other DNA
gtcatccttcctcaggcagg

SEQ ID NO: 299946 - DNA, 20 bp, synthetic construct
  source 1..20: mol_type = other DNA
agtcatccttcctcaggcag

SEQ ID NO: 299947 - DNA, 20 bp, synthetic construct
  source 1..20: mol_type = other DNA
aagtcatccttcctcaggca

SEQ ID NO: 299948 - DNA, 20 bp, synthetic construct
  source 1..20: mol_type = other DNA
caagtcatccttcctcaggc

SEQ ID NO: 299949 - DNA, 20 bp, synthetic construct
  source 1..20: mol_type = other DNA
tcaagtcatccttcctcagg

SEQ ID NO: 299950 - DNA, 20 bp, synthetic construct
  source 1..20: mol_type = other DNA
gtcaagtcatccttcctcag

SEQ ID NO: 299951 - DNA, 20 bp, synthetic construct
  source 1..20: mol_type = other DNA
tgtcaagtcatccttcctca

SEQ ID NO: 299952 - DNA, 20 bp, synthetic construct
  source 1..20: mol_type = other DNA
ttgtcaagtcatccttcctc

SEQ ID NO: 299953 - DNA, 20 bp, synthetic construct
  source 1..20: mol_type = other DNA
cttgtcaagtcatccttcct

SEQ ID NO: 299954 - DNA, 20 bp, synthetic construct
  source 1..20: mol_type = other DNA
acttgtcaagtcatccttcc

SEQ ID NO: 299955 - DNA, 20 bp, synthetic construct
  source 1..20: mol_type = other DNA
gacttgtcaagtcatccttc

SEQ ID NO: 299956 - DNA, 20 bp, synthetic construct
  source 1..20: mol_type = other DNA
tgacttgtcaagtcatcctt

SEQ ID NO: 299957 - DNA, 20 bp, synthetic construct
  source 1..20: mol_type = other DNA
ctgacttgtcaagtcatcct

SEQ ID NO: 299958 - DNA, 20 bp, synthetic construct
  source 1..20: mol_type = other DNA
cctgacttgtcaagtcatcc

SEQ ID NO: 299959 - DNA, 20 bp, synthetic construct
  source 1..20: mol_type = other DNA
tcctgacttgtcaagtcatc

SEQ ID NO: 299960 - DNA, 20 bp, synthetic construct
  source 1..20: mol_type = other DNA
ctcctgacttgtcaagtcat

SEQ ID NO: 299961 - DNA, 20 bp, synthetic construct
  source 1..20: mol_type = other DNA
tctcctgacttgtcaagtca

SEQ ID NO: 299962 - DNA, 20 bp, synthetic construct
  source 1..20: mol_type = other DNA
gtctcctgacttgtcaagtc

SEQ ID NO: 299963 - DNA, 20 bp, synthetic construct
  source 1..20: mol_type = other DNA
tgtctcctgacttgtcaagt

SEQ ID NO: 299964 - DNA, 20 bp, synthetic construct
  source 1..20: mol_type = other DNA
gtgtctcctgacttgtcaag

SEQ ID NO: 299965 - DNA, 20 bp, synthetic construct
  source 1..20: mol_type = other DNA
agtgtctcctgacttgtcaa

SEQ ID NO: 299966 - DNA, 20 bp, synthetic construct
  source 1..20: mol_type = other DNA
cagtgtctcctgacttgtca

SEQ ID NO: 299967 - DNA, 20 bp, synthetic construct
  source 1..20: mol_type = other DNA
acagtgtctcctgacttgtc

SEQ ID NO: 299968 - DNA, 20 bp, synthetic construct
  source 1..20: mol_type = other DNA
aacagtgtctcctgacttgt

SEQ ID NO: 299969 - DNA, 20 bp, synthetic construct
  source 1..20: mol_type = other DNA
gaacagtgtctcctgacttg

SEQ ID NO: 299970 - DNA, 20 bp, synthetic construct
  source 1..20: mol_type = other DNA
ggaacagtgtctcctgactt

SEQ ID NO: 299971 - DNA, 20 bp, synthetic construct
  source 1..20: mol_type = other DNA
gggaacagtgtctcctgact

SEQ ID NO: 299972 - DNA, 20 bp, synthetic construct
  source 1..20: mol_type = other DNA
tgggaacagtgtctcctgac

SEQ ID NO: 299973 - DNA, 20 bp, synthetic construct
  source 1..20: mol_type = other DNA
ttgggaacagtgtctcctga

SEQ ID NO: 299974 - DNA, 20 bp, synthetic construct
  source 1..20: mol_type = other DNA
tttgggaacagtgtctcctg

SEQ ID NO: 299975 - DNA, 20 bp, synthetic construct
  source 1..20: mol_type = other DNA
ctttgggaacagtgtctcct

SEQ ID NO: 299976 - DNA, 20 bp, synthetic construct
  source 1..20: mol_type = other DNA
gctttgggaacagtgtctcc

SEQ ID NO: 299977 - DNA, 20 bp, synthetic construct
  source 1..20: mol_type = other DNA
ggctttgggaacagtgtctc

SEQ ID NO: 299978 - DNA, 20 bp, synthetic construct
  source 1..20: mol_type = other DNA
aggctttgggaacagtgtct

SEQ ID NO: 299979 - DNA, 20 bp, synthetic construct
  source 1..20: mol_type = other DNA
aaggctttgggaacagtgtc

SEQ ID NO: 299980 - DNA, 20 bp, synthetic construct
  source 1..20: mol_type = other DNA
caaggctttgggaacagtgt

SEQ ID NO: 299981 - DNA, 20 bp, synthetic construct
  source 1..20: mol_type = other DNA
tcaaggctttgggaacagtg

SEQ ID NO: 299982 - DNA, 20 bp, synthetic construct
  source 1..20: mol_type = other DNA
gtcaaggctttgggaacagt

SEQ ID NO: 299983 - DNA, 20 bp, synthetic construct
  source 1..20: mol_type = other DNA
ggtcaaggctttgggaacag

SEQ ID NO: 299984 - DNA, 20 bp, synthetic construct
  source 1..20: mol_type = other DNA
tggtcaaggctttgggaaca

SEQ ID NO: 299985 - DNA, 20 bp, synthetic construct
  source 1..20: mol_type = other DNA
ctggtcaaggctttgggaac

SEQ ID NO: 299986 - DNA, 20 bp, synthetic construct
  source 1..20: mol_type = other DNA
tctggtcaaggctttgggaa

SEQ ID NO: 299987 - DNA, 20 bp, synthetic construct
  source 1..20: mol_type = other DNA
ctctggtcaaggctttggga

SEQ ID NO: 299988 - DNA, 20 bp, synthetic construct
  source 1..20: mol_type = other DNA
gctctggtcaaggctttggg

SEQ ID NO: 299989 - DNA, 20 bp, synthetic construct
  source 1..20: mol_type = other DNA
tgctctggtcaaggctttgg

SEQ ID NO: 299990 - DNA, 20 bp, synthetic construct
  source 1..20: mol_type = other DNA
gtgctctggtcaaggctttg

SEQ ID NO: 299991 - DNA, 20 bp, synthetic construct
  source 1..20: mol_type = other DNA
ggtgctctggtcaaggcttt

SEQ ID NO: 299992 - DNA, 20 bp, synthetic construct
  source 1..20: mol_type = other DNA
aggtgctctggtcaaggctt

SEQ ID NO: 299993 - DNA, 20 bp, synthetic construct
  source 1..20: mol_type = other DNA
gaggtgctctggtcaaggct

SEQ ID NO: 299994 - DNA, 20 bp, synthetic construct
  source 1..20: mol_type = other DNA
tgaggtgctctggtcaaggc

SEQ ID NO: 299995 - DNA, 20 bp, synthetic construct
  source 1..20: mol_type = other DNA
ctgaggtgctctggtcaagg

SEQ ID NO: 299996 - DNA, 20 bp, synthetic construct
  source 1..20: mol_type = other DNA
gctgaggtgctctggtcaag

SEQ ID NO: 299997 - DNA, 20 bp, synthetic construct
  source 1..20: mol_type = other DNA
ggctgaggtgctctggtcaa

SEQ ID NO: 299998 - DNA, 20 bp, synthetic construct
  source 1..20: mol_type = other DNA
gggctgaggtgctctggtca

SEQ ID NO: 299999 - DNA, 20 bp, synthetic construct
  source 1..20: mol_type = other DNA
cgggctgaggtgctctggtc

SEQ ID NO: 300000 - DNA, 20 bp, synthetic construct
  source 1..20: mol_type = other DNA
gcgggctgaggtgctctggt

SEQ ID NO: 300001 - DNA, 20 bp, synthetic construct
  source 1..20: mol_type = other DNA
agcgggctgaggtgctctgg

SEQ ID NO: 300002 - DNA, 20 bp, synthetic construct
  source 1..20: mol_type = other DNA
cagcgggctgaggtgctctg

SEQ ID NO: 300003 - DNA, 20 bp, synthetic construct
  source 1..20: mol_type = other DNA
tcagcgggctgaggtgctct

SEQ ID NO: 300004 - DNA, 20 bp, synthetic construct
  source 1..20: mol_type = other DNA
gtcagcgggctgaggtgctc

SEQ ID NO: 300005 - DNA, 20 bp, synthetic construct
  source 1..20: mol_type = other DNA
ggtcagcgggctgaggtgct

SEQ ID NO: 300006 - DNA, 20 bp, synthetic construct
  source 1..20: mol_type = other DNA
aggtcagcgggctgaggtgc

SEQ ID NO: 300007 - DNA, 20 bp, synthetic construct
  source 1..20: mol_type = other DNA
aaggtcagcgggctgaggtg

SEQ ID NO: 300008 - DNA, 20 bp, synthetic construct
  source 1..20: mol_type = other DNA
caaggtcagcgggctgaggt

SEQ ID NO: 300009 - DNA, 20 bp, synthetic construct
  source 1..20: mol_type = other DNA
gcaaggtcagcgggctgagg

SEQ ID NO: 300010 - DNA, 20 bp, synthetic construct
  source 1..20: mol_type = other DNA
tgcaaggtcagcgggctgag

SEQ ID NO: 300011 - DNA, 20 bp, synthetic construct
  source 1..20: mol_type = other DNA
gtgcaaggtcagcgggctga

SEQ ID NO: 300012 - DNA, 20 bp, synthetic construct
  source 1..20: mol_type = other DNA
tgtgcaaggtcagcgggctg

SEQ ID NO: 300013 - DNA, 20 bp, synthetic construct
  source 1..20: mol_type = other DNA
ttgtgcaaggtcagcgggct

SEQ ID NO: 300014 - DNA, 20 bp, synthetic construct
  source 1..20: mol_type = other DNA
tttgtgcaaggtcagcgggc

SEQ ID NO: 300015 - DNA, 20 bp, synthetic construct
  source 1..20: mol_type = other DNA
gtttgtgcaaggtcagcggg

SEQ ID NO: 300016 - DNA, 20 bp, synthetic construct
  source 1..20: mol_type = other DNA
agtttgtgcaaggtcagcgg

SEQ ID NO: 300017 - DNA, 20 bp, synthetic construct
  source 1..20: mol_type = other DNA
gagtttgtgcaaggtcagcg

SEQ ID NO: 300018 - DNA, 20 bp, synthetic construct
  source 1..20: mol_type = other DNA
ggagtttgtgcaaggtcagc

SEQ ID NO: 300019 - DNA, 20 bp, synthetic construct
  source 1..20: mol_type = other DNA
tggagtttgtgcaaggtcag

SEQ ID NO: 300020 - DNA, 20 bp, synthetic construct
  source 1..20: mol_type = other DNA
atggagtttgtgcaaggtca

SEQ ID NO: 300021 - DNA, 20 bp, synthetic construct
  source 1..20: mol_type = other DNA
gatggagtttgtgcaaggtc

SEQ ID NO: 300022 - DNA, 20 bp, synthetic construct
  source 1..20: mol_type = other DNA
agatggagtttgtgcaaggt

SEQ ID NO: 300023 - DNA, 20 bp, synthetic construct
  source 1..20: mol_type = other DNA
cagatggagtttgtgcaagg

SEQ ID NO: 300024 - DNA, 20 bp, synthetic construct
  source 1..20: mol_type = other DNA
gcagatggagtttgtgcaag

SEQ ID NO: 300025 - DNA, 20 bp, synthetic construct
  source 1..20: mol_type = other DNA
agcagatggagtttgtgcaa

SEQ ID NO: 300026 - DNA, 20 bp, synthetic construct
  source 1..20: mol_type = other DNA
cagcagatggagtttgtgca

SEQ ID NO: 300027 - DNA, 20 bp, synthetic construct
  source 1..20: mol_type = other DNA
gcagcagatggagtttgtgc

SEQ ID NO: 300028 - DNA, 20 bp, synthetic construct
  source 1..20: mol_type = other DNA
ggcagcagatggagtttgtg

SEQ ID NO: 300029 - DNA, 20 bp, synthetic construct
  source 1..20: mol_type = other DNA
tggcagcagatggagtttgt

SEQ ID NO: 300030 - DNA, 20 bp, synthetic construct
  source 1..20: mol_type = other DNA
atggcagcagatggagtttg

SEQ ID NO: 300031 - DNA, 20 bp, synthetic construct
  source 1..20: mol_type = other DNA
catggcagcagatggagttt

SEQ ID NO: 300032 - DNA, 20 bp, synthetic construct
  source 1..20: mol_type = other DNA
tcatggcagcagatggagtt

SEQ ID NO: 300033 - DNA, 20 bp, synthetic construct
  source 1..20: mol_type = other DNA
ctcatggcagcagatggagt

SEQ ID NO: 300034 - DNA, 20 bp, synthetic construct
  source 1..20: mol_type = other DNA
tctcatggcagcagatggag

SEQ ID NO: 300035 - DNA, 20 bp, synthetic construct
  source 1..20: mol_type = other DNA
ttctcatggcagcagatgga

SEQ ID NO: 300036 - DNA, 20 bp, synthetic construct
  source 1..20: mol_type = other DNA
tttctcatggcagcagatgg

SEQ ID NO: 300037 - DNA, 20 bp, synthetic construct
  source 1..20: mol_type = other DNA
ttttctcatggcagcagatg

SEQ ID NO: 300038 - DNA, 20 bp, synthetic construct
  source 1..20: mol_type = other DNA
cttttctcatggcagcagat

SEQ ID NO: 300039 - DNA, 20 bp, synthetic construct
  source 1..20: mol_type = other DNA
ccttttctcatggcagcaga

SEQ ID NO: 300040 - DNA, 20 bp, synthetic construct
  source 1..20: mol_type = other DNA
cccttttctcatggcagcag

SEQ ID NO: 300041 - DNA, 20 bp, synthetic construct
  source 1..20: mol_type = other DNA
tcccttttctcatggcagca

SEQ ID NO: 300042 - DNA, 20 bp, synthetic construct
  source 1..20: mol_type = other DNA
ttcccttttctcatggcagc

SEQ ID NO: 300043 - DNA, 20 bp, synthetic construct
  source 1..20: mol_type = other DNA
cttcccttttctcatggcag

SEQ ID NO: 300044 - DNA, 20 bp, synthetic construct
  source 1..20: mol_type = other DNA
gcttcccttttctcatggca

SEQ ID NO: 300045 - DNA, 20 bp, synthetic construct
  source 1..20: mol_type = other DNA
ggcttcccttttctcatggc

SEQ ID NO: 300046 - DNA, 20 bp, synthetic construct
  source 1..20: mol_type = other DNA
cggcttcccttttctcatgg

SEQ ID NO: 300047 - DNA, 20 bp, synthetic construct
  source 1..20: mol_type = other DNA
gcggcttcccttttctcatg

SEQ ID NO: 300048 - DNA, 20 bp, synthetic construct
  source 1..20: mol_type = other DNA
ggcggcttcccttttctcat

SEQ ID NO: 300049 - DNA, 20 bp, synthetic construct
  source 1..20: mol_type = other DNA
aggcggcttcccttttctca

SEQ ID NO: 300050 - DNA, 20 bp, synthetic construct
  source 1..20: mol_type = other DNA
aaggcggcttcccttttctc

SEQ ID NO: 300051 - DNA, 20 bp, synthetic construct
  source 1..20: mol_type = other DNA
aaaggcggcttcccttttct

SEQ ID NO: 300052 - DNA, 20 bp, synthetic construct
  source 1..20: mol_type = other DNA
caaaggcggcttcccttttc

SEQ ID NO: 300053 - DNA, 20 bp, synthetic construct
  source 1..20: mol_type = other DNA
gcaaaggcggcttccctttt

SEQ ID NO: 300054 - DNA, 20 bp, synthetic construct
  source 1..20: mol_type = other DNA
tgcaaaggcggcttcccttt

SEQ ID NO: 300055 - DNA, 20 bp, synthetic construct
  source 1..20: mol_type = other DNA
ttgcaaaggcggcttccctt

SEQ ID NO: 300056 - DNA, 20 bp, synthetic construct
  source 1..20: mol_type = other DNA
tttgcaaaggcggcttccct

SEQ ID NO: 300057 - DNA, 20 bp, synthetic construct
  source 1..20: mol_type = other DNA
ttttgcaaaggcggcttccc

SEQ ID NO: 300058 - DNA, 20 bp, synthetic construct
  source 1..20: mol_type = other DNA
gttttgcaaaggcggcttcc

SEQ ID NO: 300059 - DNA, 20 bp, synthetic construct
  source 1..20: mol_type = other DNA
tgttttgcaaaggcggcttc

SEQ ID NO: 300060 - DNA, 20 bp, synthetic construct
  source 1..20: mol_type = other DNA
atgttttgcaaaggcggctt

SEQ ID NO: 300061 - DNA, 20 bp, synthetic construct
  source 1..20: mol_type = other DNA
aatgttttgcaaaggcggct

SEQ ID NO: 300062 - DNA, 20 bp, synthetic construct
  source 1..20: mol_type = other DNA
caatgttttgcaaaggcggc

SEQ ID NO: 300063 - DNA, 20 bp, synthetic construct
  source 1..20: mol_type = other DNA
gcaatgttttgcaaaggcgg

SEQ ID NO: 300064 - DNA, 20 bp, synthetic construct
  source 1..20: mol_type = other DNA
agcaatgttttgcaaaggcg

SEQ ID NO: 300065 - DNA, 20 bp, synthetic construct
  source 1..20: mol_type = other DNA
cagcaatgttttgcaaaggc

SEQ ID NO: 300066 - DNA, 20 bp, synthetic construct
  source 1..20: mol_type = other DNA
gcagcaatgttttgcaaagg

SEQ ID NO: 300067 - DNA, 20 bp, synthetic construct
  source 1..20: mol_type = other DNA
ggcagcaatgttttgcaaag

SEQ ID NO: 300068 - DNA, 20 bp, synthetic construct
  source 1..20: mol_type = other DNA
aggcagcaatgttttgcaaa

SEQ ID NO: 300069 - DNA, 20 bp, synthetic construct
  source 1..20: mol_type = other DNA
taggcagcaatgttttgcaa

SEQ ID NO: 300070 - DNA, 20 bp, synthetic construct
  source 1..20: mol_type = other DNA
ttaggcagcaatgttttgca

SEQ ID NO: 300071 - DNA, 20 bp, synthetic construct
  source 1..20: mol_type = other DNA
tttaggcagcaatgttttgc

SEQ ID NO: 300072 - DNA, 20 bp, synthetic construct
  source 1..20: mol_type = other DNA
ctttaggcagcaatgttttg

SEQ ID NO: 300073 - DNA, 20 bp, synthetic construct
  source 1..20: mol_type = other DNA
tctttaggcagcaatgtttt

SEQ ID NO: 300074 - DNA, 20 bp, synthetic construct
  source 1..20: mol_type = other DNA
ttctttaggcagcaatgttt

SEQ ID NO: 300075 - DNA, 20 bp, synthetic construct
  source 1..20: mol_type = other DNA
tttctttaggcagcaatgtt

SEQ ID NO: 300076 - DNA, 20 bp, synthetic construct
  source 1..20: mol_type = other DNA
gtttctttaggcagcaatgt

SEQ ID NO: 300077 - DNA, 20 bp, synthetic construct
  source 1..20: mol_type = other DNA
agtttctttaggcagcaatg

SEQ ID NO: 300078 - DNA, 20 bp, synthetic construct
  source 1..20: mol_type = other DNA
gagtttctttaggcagcaat

SEQ ID NO: 300079 - DNA, 20 bp, synthetic construct
  source 1..20: mol_type = other DNA
tgagtttctttaggcagcaa

SEQ ID NO: 300080 - DNA, 20 bp, synthetic construct
  source 1..20: mol_type = other DNA
ctgagtttctttaggcagca

SEQ ID NO: 300081 - DNA, 20 bp, synthetic construct
  source 1..20: mol_type = other DNA
gctgagtttctttaggcagc

SEQ ID NO: 300082 - DNA, 20 bp, synthetic construct
  source 1..20: mol_type = other DNA
tgctgagtttctttaggcag

SEQ ID NO: 300083 - DNA, 20 bp, synthetic construct
  source 1..20: mol_type = other DNA
ctgctgagtttctttaggca

SEQ ID NO: 300084 - DNA, 20 bp, synthetic construct
  source 1..20: mol_type = other DNA
gctgctgagtttctttaggc

SEQ ID NO: 300085 - DNA, 20 bp, synthetic construct
  source 1..20: mol_type = other DNA
ggctgctgagtttctttagg

SEQ ID NO: 300086 - DNA, 20 bp, synthetic construct
  source 1..20: mol_type = other DNA
aggctgctgagtttctttag

SEQ ID NO: 300087 - DNA, 20 bp, synthetic construct
  source 1..20: mol_type = other DNA
gaggctgctgagtttcttta

SEQ ID NO: 300088 - DNA, 20 bp, synthetic construct
  source 1..20: mol_type = other DNA
tgaggctgctgagtttcttt

SEQ ID NO: 300089 - DNA, 20 bp, synthetic construct
  source 1..20: mol_type = other DNA
ctgaggctgctgagtttctt

SEQ ID NO: 300090 - DNA, 20 bp, synthetic construct
  source 1..20: mol_type = other DNA
cctgaggctgctgagtttct

SEQ ID NO: 300091 - DNA, 20 bp, synthetic construct
  source 1..20: mol_type = other DNA
gcctgaggctgctgagtttc

SEQ ID NO: 300092 - DNA, 20 bp, synthetic construct
  source 1..20: mol_type = other DNA
ggcctgaggctgctgagttt

SEQ ID NO: 300093 - DNA, 20 bp, synthetic construct
  source 1..20: mol_type = other DNA
gggcctgaggctgctgagtt

SEQ ID NO: 300094 - DNA, 20 bp, synthetic construct
  source 1..20: mol_type = other DNA
tgggcctgaggctgctgagt

SEQ ID NO: 300095 - DNA, 20 bp, synthetic construct
  source 1..20: mol_type = other DNA
ttgggcctgaggctgctgag

SEQ ID NO: 300096 - DNA, 20 bp, synthetic construct
  source 1..20: mol_type = other DNA
attgggcctgaggctgctga

SEQ ID NO: 300097 - DNA, 20 bp, synthetic construct
  source 1..20: mol_type = other DNA
aattgggcctgaggctgctg

SEQ ID NO: 300098 - DNA, 20 bp, synthetic construct
  source 1..20: mol_type = other DNA
gaattgggcctgaggctgct

SEQ ID NO: 300099 - DNA, 20 bp, synthetic construct
  source 1..20: mol_type = other DNA
agaattgggcctgaggctgc

SEQ ID NO: 300100 - DNA, 20 bp, synthetic construct
  source 1..20: mol_type = other DNA
cagaattgggcctgaggctg

SEQ ID NO: 300101 - DNA, 20 bp, synthetic construct
  source 1..20: mol_type = other DNA
gcagaattgggcctgaggct

SEQ ID NO: 300102 - DNA, 20 bp, synthetic construct
  source 1..20: mol_type = other DNA
ggcagaattgggcctgaggc

SEQ ID NO: 300103 - DNA, 20 bp, synthetic construct
  source 1..20: mol_type = other DNA
tggcagaattgggcctgagg

SEQ ID NO: 300104 - DNA, 20 bp, synthetic construct
  source 1..20: mol_type = other DNA
gtggcagaattgggcctgag

SEQ ID NO: 300105 - DNA, 20 bp, synthetic construct
  source 1..20: mol_type = other DNA
agtggcagaattgggcctga

SEQ ID NO: 300106 - DNA, 20 bp, synthetic construct
  source 1..20: mol_type = other DNA
aagtggcagaattgggcctg

SEQ ID NO: 300107 - DNA, 20 bp, synthetic construct
  source 1..20: mol_type = other DNA
gaagtggcagaattgggcct

SEQ ID NO: 300108 - DNA, 20 bp, synthetic construct
  source 1..20: mol_type = other DNA
agaagtggcagaattgggcc

SEQ ID NO: 300109 - DNA, 20 bp, synthetic construct
  source 1..20: mol_type = other DNA
cagaagtggcagaattgggc

SEQ ID NO: 300110 - DNA, 20 bp, synthetic construct
  source 1..20: mol_type = other DNA
ccagaagtggcagaattggg

SEQ ID NO: 300111 - DNA, 20 bp, synthetic construct
  source 1..20: mol_type = other DNA
accagaagtggcagaattgg

SEQ ID NO: 300112 - DNA, 20 bp, synthetic construct
  source 1..20: mol_type = other DNA
aaccagaagtggcagaattg

SEQ ID NO: 300113 - DNA, 20 bp, synthetic construct
  source 1..20: mol_type = other DNA
aaaccagaagtggcagaatt

SEQ ID NO: 300114 - DNA, 20 bp, synthetic construct
  source 1..20: mol_type = other DNA
caaaccagaagtggcagaat

SEQ ID NO: 300115 - DNA, 20 bp, synthetic construct
  source 1..20: mol_type = other DNA
ccaaaccagaagtggcagaa

SEQ ID NO: 300116 - DNA, 20 bp, synthetic construct
  source 1..20: mol_type = other DNA
cccaaaccagaagtggcaga

SEQ ID NO: 300117 - DNA, 20 bp, synthetic construct
  source 1..20: mol_type = other DNA
acccaaaccagaagtggcag

SEQ ID NO: 300118 - DNA, 20 bp, synthetic construct
  source 1..20: mol_type = other DNA
tacccaaaccagaagtggca

SEQ ID NO: 300119 - DNA, 20 bp, synthetic construct
  source 1..20: mol_type = other DNA
gtacccaaaccagaagtggc

SEQ ID NO: 300120 - DNA, 20 bp, synthetic construct
  source 1..20: mol_type = other DNA
tgtacccaaaccagaagtgg

SEQ ID NO: 300121 - DNA, 20 bp, synthetic construct
  source 1..20: mol_type = other DNA
ctgtacccaaaccagaagtg

SEQ ID NO: 300122 - DNA, 20 bp, synthetic construct
  source 1..20: mol_type = other DNA
actgtacccaaaccagaagt

SEQ ID NO: 300123 - DNA, 20 bp, synthetic construct
  source 1..20: mol_type = other DNA
aactgtacccaaaccagaag

SEQ ID NO: 300124 - DNA, 20 bp, synthetic construct
  source 1..20: mol_type = other DNA
taactgtacccaaaccagaa

SEQ ID NO: 300125 - DNA, 20 bp, synthetic construct
  source 1..20: mol_type = other DNA
ttaactgtacccaaaccaga

SEQ ID NO: 300126 - DNA, 20 bp, synthetic construct
  source 1..20: mol_type = other DNA
tttaactgtacccaaaccag

SEQ ID NO: 300127 - DNA, 20 bp, synthetic construct
  source 1..20: mol_type = other DNA
ctttaactgtacccaaacca

SEQ ID NO: 300128 - DNA, 20 bp, synthetic construct
  source 1..20: mol_type = other DNA
cctttaactgtacccaaacc

SEQ ID NO: 300129 - DNA, 20 bp, synthetic construct
  source 1..20: mol_type = other DNA
gcctttaactgtacccaaac

SEQ ID NO: 300130 - DNA, 20 bp, synthetic construct
  source 1..20: mol_type = other DNA
tgcctttaactgtacccaaa

SEQ ID NO: 300131 - DNA, 20 bp, synthetic construct
  source 1..20: mol_type = other DNA
ttgcctttaactgtacccaa

SEQ ID NO: 300132 - DNA, 20 bp, synthetic construct
  source 1..20: mol_type = other DNA
gttgcctttaactgtaccca

SEQ ID NO: 300133 - DNA, 20 bp, synthetic construct
  source 1..20: mol_type = other DNA
ggttgcctttaactgtaccc

SEQ ID NO: 300134 - DNA, 20 bp, synthetic construct
  source 1..20: mol_type = other DNA
gggttgcctttaactgtacc

SEQ ID NO: 300135 - DNA, 20 bp, synthetic construct
  source 1..20: mol_type = other DNA
agggttgcctttaactgtac

SEQ ID NO: 300136 - DNA, 20 bp, synthetic construct
  source 1..20: mol_type = other DNA
cagggttgcctttaactgta

SEQ ID NO: 300137 - DNA, 20 bp, synthetic construct
  source 1..20: mol_type = other DNA
tcagggttgcctttaactgt

SEQ ID NO: 300138 - DNA, 20 bp, synthetic construct
  source 1..20: mol_type = other DNA
ctcagggttgcctttaactg

SEQ ID NO: 300139 - DNA, 20 bp, synthetic construct
  source 1..20: mol_type = other DNA
cctcagggttgcctttaact

SEQ ID NO: 300140 - DNA, 20 bp, synthetic construct
  source 1..20: mol_type = other DNA
ccctcagggttgcctttaac

SEQ ID NO: 300141 - DNA, 20 bp, synthetic construct
  source 1..20: mol_type = other DNA
tccctcagggttgcctttaa

SEQ ID NO: 300142 - DNA, 20 bp, synthetic construct
  source 1..20: mol_type = other DNA
gtccctcagggttgccttta

SEQ ID NO: 300143 - DNA, 20 bp, synthetic construct
  source 1..20: mol_type = other DNA
agtccctcagggttgccttt

SEQ ID NO: 300144 - DNA, 20 bp, synthetic construct
  source 1..20: mol_type = other DNA
aagtccctcagggttgcctt

SEQ ID NO: 300145 - DNA, 20 bp, synthetic construct
  source 1..20: mol_type = other DNA
caagtccctcagggttgcct

SEQ ID NO: 300146 - DNA, 20 bp, synthetic construct
  source 1..20: mol_type = other DNA
ccaagtccctcagggttgcc

SEQ ID NO: 300147 - DNA, 20 bp, synthetic construct
  source 1..20: mol_type = other DNA
gccaagtccctcagggttgc

SEQ ID NO: 300148 - DNA, 20 bp, synthetic construct
  source 1..20: mol_type = other DNA
tgccaagtccctcagggttg

SEQ ID NO: 300149 - DNA, 20 bp, synthetic construct
  source 1..20: mol_type = other DNA
ctgccaagtccctcagggtt

SEQ ID NO: 300150 - DNA, 20 bp, synthetic construct
  source 1..20: mol_type = other DNA
actgccaagtccctcagggt

SEQ ID NO: 300151 - DNA, 20 bp, synthetic construct
  source 1..20: mol_type = other DNA
tactgccaagtccctcaggg

SEQ ID NO: 300152 - DNA, 20 bp, synthetic construct
  source 1..20: mol_type = other DNA
ctactgccaagtccctcagg

SEQ ID NO: 300153 - DNA, 20 bp, synthetic construct
  source 1..20: mol_type = other DNA
tctactgccaagtccctcag

SEQ ID NO: 300154 - DNA, 20 bp, synthetic construct
  source 1..20: mol_type = other DNA
ttctactgccaagtccctca

SEQ ID NO: 300155 - DNA, 20 bp, synthetic construct
  source 1..20: mol_type = other DNA
tttctactgccaagtccctc

SEQ ID NO: 300156 - DNA, 20 bp, synthetic construct
  source 1..20: mol_type = other DNA
atttctactgccaagtccct

SEQ ID NO: 300157 - DNA, 20 bp, synthetic construct
  source 1..20: mol_type = other DNA
gatttctactgccaagtccc

SEQ ID NO: 300158 - DNA, 20 bp, synthetic construct
  source 1..20: mol_type = other DNA
ggatttctactgccaagtcc

SEQ ID NO: 300159 - DNA, 20 bp, synthetic construct
  source 1..20: mol_type = other DNA
tggatttctactgccaagtc

SEQ ID NO: 300160 - DNA, 20 bp, synthetic construct
  source 1..20: mol_type = other DNA
ctggatttctactgccaagt

SEQ ID NO: 300161 - DNA, 20 bp, synthetic construct
  source 1..20: mol_type = other DNA
cctggatttctactgccaag

SEQ ID NO: 300162 - DNA, 20 bp, synthetic construct
  source 1..20: mol_type = other DNA
ccctggatttctactgccaa

SEQ ID NO: 300163 - DNA, 20 bp, synthetic construct
  source 1..20: mol_type = other DNA
gccctggatttctactgcca

SEQ ID NO: 300164 - DNA, 20 bp, synthetic construct
  source 1..20: mol_type = other DNA
ggccctggatttctactgcc

SEQ ID NO: 300165 - DNA, 20 bp, synthetic construct
  source 1..20: mol_type = other DNA
aggccctggatttctactgc

SEQ ID NO: 300166 - DNA, 20 bp, synthetic construct
  source 1..20: mol_type = other DNA
gaggccctggatttctactg

SEQ ID NO: 300167 - DNA, 20 bp, synthetic construct
  source 1..20: mol_type = other DNA
ggaggccctggatttctact

SEQ ID NO: 300168 - DNA, 20 bp, synthetic construct
  source 1..20: mol_type = other DNA
gggaggccctggatttctac

SEQ ID NO: 300169 - DNA, 20 bp, synthetic construct
  source 1..20: mol_type = other DNA
ggggaggccctggatttcta

SEQ ID NO: 300170 - DNA, 20 bp, synthetic construct
  source 1..20: mol_type = other DNA
aggggaggccctggatttct

SEQ ID NO: 300171 - DNA, 20 bp, synthetic construct
  source 1..20: mol_type = other DNA
caggggaggccctggatttc

SEQ ID NO: 300172 - DNA, 20 bp, synthetic construct
  source 1..20: mol_type = other DNA
ccaggggaggccctggattt

SEQ ID NO: 300173 - DNA, 20 bp, synthetic construct
  source 1..20: mol_type = other DNA
cccaggggaggccctggatt

SEQ ID NO: 300174 - DNA, 20 bp, synthetic construct
  source 1..20: mol_type = other DNA
ccccaggggaggccctggat

SEQ ID NO: 300175 - DNA, 20 bp, synthetic construct
  source 1..20: mol_type = other DNA
gccccaggggaggccctgga

SEQ ID NO: 300176 - DNA, 20 bp, synthetic construct
  source 1..20: mol_type = other DNA
agccccaggggaggccctgg

SEQ ID NO: 300177 - DNA, 20 bp, synthetic construct
  source 1..20: mol_type = other DNA
cagccccaggggaggccctg

SEQ ID NO: 300178 - DNA, 20 bp, synthetic construct
  source 1..20: mol_type = other DNA
ccagccccaggggaggccct

SEQ ID NO: 300179 - DNA, 20 bp, synthetic construct
  source 1..20: mol_type = other DNA
gccagccccaggggaggccc

SEQ ID NO: 300180 - DNA, 20 bp, synthetic construct
  source 1..20: mol_type = other DNA
tgccagccccaggggaggcc

SEQ ID NO: 300181 - DNA, 20 bp, synthetic construct
  source 1..20: mol_type = other DNA
ctgccagccccaggggaggc

SEQ ID NO: 300182 - DNA, 20 bp, synthetic construct
  source 1..20: mol_type = other DNA
gctgccagccccaggggagg

SEQ ID NO: 300183 - DNA, 20 bp, synthetic construct
  source 1..20: mol_type = other DNA
agctgccagccccaggggag

SEQ ID NO: 300184 - DNA, 20 bp, synthetic construct
  source 1..20: mol_type = other DNA
aagctgccagccccagggga

SEQ ID NO: 300185 - DNA, 20 bp, synthetic construct
  source 1..20: mol_type = other DNA
gaagctgccagccccagggg

SEQ ID NO: 300186 - DNA, 20 bp, synthetic construct
  source 1..20: mol_type = other DNA
cgaagctgccagccccaggg

SEQ ID NO: 300187 - DNA, 20 bp, synthetic construct
  source 1..20: mol_type = other DNA
acgaagctgccagccccagg

SEQ ID NO: 300188 - DNA, 20 bp, synthetic construct
  source 1..20: mol_type = other DNA
cacgaagctgccagccccag

SEQ ID NO: 300189 - DNA, 20 bp, synthetic construct
  source 1..20: mol_type = other DNA
acacgaagctgccagcccca

SEQ ID NO: 300190 - DNA, 20 bp, synthetic construct
  source 1..20: mol_type = other DNA
cacacgaagctgccagcccc

SEQ ID NO: 300191 - DNA, 20 bp, synthetic construct
  source 1..20: mol_type = other DNA
gcacacgaagctgccagccc

SEQ ID NO: 300192 - DNA, 20 bp, synthetic construct
  source 1..20: mol_type = other DNA
tgcacacgaagctgccagcc

SEQ ID NO: 300193 - DNA, 20 bp, synthetic construct
  source 1..20: mol_type = other DNA
ctgcacacgaagctgccagc

SEQ ID NO: 300194 - DNA, 20 bp, synthetic construct
  source 1..20: mol_type = other DNA
gctgcacacgaagctgccag

SEQ ID NO: 300195 - DNA, 20 bp, synthetic construct
  source 1..20: mol_type = other DNA
agctgcacacgaagctgcca

SEQ ID NO: 300196 - DNA, 20 bp, synthetic construct
  source 1..20: mol_type = other DNA
tagctgcacacgaagctgcc

SEQ ID NO: 300197 - DNA, 20 bp, synthetic construct
  source 1..20: mol_type = other DNA
ctagctgcacacgaagctgc

SEQ ID NO: 300198 - DNA, 20 bp, synthetic construct
  source 1..20: mol_type = other DNA
tctagctgcacacgaagctg

SEQ ID NO: 300199 - DNA, 20 bp, synthetic construct
  source 1..20: mol_type = other DNA
ctctagctgcacacgaagct

SEQ ID NO: 300200 - DNA, 20 bp, synthetic construct
  source 1..20: mol_type = other DNA
gctctagctgcacacgaagc

SEQ ID NO: 300201 - DNA, 20 bp, synthetic construct
  source 1..20: mol_type = other DNA
agctctagctgcacacgaag

SEQ ID NO: 300202 - DNA, 20 bp, synthetic construct
  source 1..20: mol_type = other DNA
aagctctagctgcacacgaa

SEQ ID NO: 300203 - DNA, 20 bp, synthetic construct
  source 1..20: mol_type = other DNA
aaagctctagctgcacacga

SEQ ID NO: 300204 - DNA, 20 bp, synthetic construct
  source 1..20: mol_type = other DNA
taaagctctagctgcacacg

SEQ ID NO: 300205 - DNA, 20 bp, synthetic construct
  source 1..20: mol_type = other DNA
gtaaagctctagctgcacac

SEQ ID NO: 300206 - DNA, 20 bp, synthetic construct
  source 1..20: mol_type = other DNA
ggtaaagctctagctgcaca

SEQ ID NO: 300207 - DNA, 20 bp, synthetic construct
  source 1..20: mol_type = other DNA
aggtaaagctctagctgcac

SEQ ID NO: 300208 - DNA, 20 bp, synthetic construct
  source 1..20: mol_type = other DNA
caggtaaagctctagctgca

SEQ ID NO: 300209 - DNA, 20 bp, synthetic construct
  source 1..20: mol_type = other DNA
tcaggtaaagctctagctgc

SEQ ID NO: 300210 - DNA, 20 bp, synthetic construct
  source 1..20: mol_type = other DNA
ttcaggtaaagctctagctg

SEQ ID NO: 300211 - DNA, 20 bp, synthetic construct
  source 1..20: mol_type = other DNA
tttcaggtaaagctctagct

SEQ ID NO: 300212 - DNA, 20 bp, synthetic construct
  source 1..20: mol_type = other DNA
ctttcaggtaaagctctagc

SEQ ID NO: 300213 - DNA, 20 bp, synthetic construct
  source 1..20: mol_type = other DNA
cctttcaggtaaagctctag

SEQ ID NO: 300214 - DNA, 20 bp, synthetic construct
  source 1..20: mol_type = other DNA
tcctttcaggtaaagctcta

SEQ ID NO: 300215 - DNA, 20 bp, synthetic construct
  source 1..20: mol_type = other DNA
ttcctttcaggtaaagctct

SEQ ID NO: 300216 - DNA, 20 bp, synthetic construct
  source 1..20: mol_type = other DNA
cttcctttcaggtaaagctc

SEQ ID NO: 300217 - DNA, 20 bp, synthetic construct
  source 1..20: mol_type = other DNA
acttcctttcaggtaaagct

SEQ ID NO: 300218 - DNA, 20 bp, synthetic construct
  source 1..20: mol_type = other DNA
gacttcctttcaggtaaagc

SEQ ID NO: 300219 - DNA, 20 bp, synthetic construct
  source 1..20: mol_type = other DNA
agacttcctttcaggtaaag

SEQ ID NO: 300220 - DNA, 20 bp, synthetic construct
  source 1..20: mol_type = other DNA
gagacttcctttcaggtaaa

SEQ ID NO: 300221 - DNA, 20 bp, synthetic construct
  source 1..20: mol_type = other DNA
agagacttcctttcaggtaa

SEQ ID NO: 300222 - DNA, 20 bp, synthetic construct
  source 1..20: mol_type = other DNA
cagagacttcctttcaggta

SEQ ID NO: 300223 - DNA, 20 bp, synthetic construct
  source 1..20: mol_type = other DNA
ccagagacttcctttcaggt

SEQ ID NO: 300224 - DNA, 20 bp, synthetic construct
  source 1..20: mol_type = other DNA
cccagagacttcctttcagg

SEQ ID NO: 300225 - DNA, 20 bp, synthetic construct
  source 1..20: mol_type = other DNA
gcccagagacttcctttcag

SEQ ID NO: 300226 - DNA, 20 bp, synthetic construct
  source 1..20: mol_type = other DNA
ggcccagagacttcctttca

SEQ ID NO: 300227 - DNA, 20 bp, synthetic construct
  source 1..20: mol_type = other DNA
gggcccagagacttcctttc

SEQ ID NO: 300228 - DNA, 20 bp, synthetic construct
  source 1..20: mol_type = other DNA
tgggcccagagacttccttt

SEQ ID NO: 300229 - DNA, 20 bp, synthetic construct
  source 1..20: mol_type = other DNA
ctgggcccagagacttcctt

SEQ ID NO: 300230 - DNA, 20 bp, synthetic construct
  source 1..20: mol_type = other DNA
tctgggcccagagacttcct

SEQ ID NO: 300231 - DNA, 20 bp, synthetic construct
  source 1..20: mol_type = other DNA
ttctgggcccagagacttcc

SEQ ID NO: 300232 - DNA, 20 bp, synthetic construct
  source 1..20: mol_type = other DNA
gttctgggcccagagacttc

SEQ ID NO: 300233 - DNA, 20 bp, synthetic construct
  source 1..20: mol_type = other DNA
agttctgggcccagagactt

SEQ ID NO: 300234 - DNA, 20 bp, synthetic construct
  source 1..20: mol_type = other DNA
gagttctgggcccagagact

SEQ ID NO: 300235 - DNA, 20 bp, synthetic construct
  source 1..20: mol_type = other DNA
agagttctgggcccagagac

SEQ ID NO: 300236 - DNA, 20 bp, synthetic construct
  source 1..20: mol_type = other DNA
gagagttctgggcccagaga

SEQ ID NO: 300237 - DNA, 20 bp, synthetic construct
  source 1..20: mol_type = other DNA
ggagagttctgggcccagag

SEQ ID NO: 300238 - DNA, 20 bp, synthetic construct
  source 1..20: mol_type = other DNA
tggagagttctgggcccaga

SEQ ID NO: 300239 - DNA, 20 bp, synthetic construct
  source 1..20: mol_type = other DNA
gtggagagttctgggcccag

SEQ ID NO: 300240 - DNA, 20 bp, synthetic construct
  source 1..20: mol_type = other DNA
ggtggagagttctgggccca

SEQ ID NO: 300241 - DNA, 20 bp, synthetic construct
  source 1..20: mol_type = other DNA
tggtggagagttctgggccc

SEQ ID NO: 300242 - DNA, 20 bp, synthetic construct
  source 1..20: mol_type = other DNA
ttggtggagagttctgggcc

SEQ ID NO: 300243 - DNA, 20 bp, synthetic construct
  source 1..20: mol_type = other DNA
cttggtggagagttctgggc

SEQ ID NO: 300244 - DNA, 20 bp, synthetic construct
  source 1..20: mol_type = other DNA
tcttggtggagagttctggg

SEQ ID NO: 300245 - DNA, 20 bp, synthetic construct
  source 1..20: mol_type = other DNA
ctcttggtggagagttctgg

SEQ ID NO: 300246 - DNA, 20 bp, synthetic construct
  source 1..20: mol_type = other DNA
gctcttggtggagagttctg

SEQ ID NO: 300247 - DNA, 20 bp, synthetic construct
  source 1..20: mol_type = other DNA
ggctcttggtggagagttct

SEQ ID NO: 300248 - DNA, 20 bp, synthetic construct
  source 1..20: mol_type = other DNA
aggctcttggtggagagttc

SEQ ID NO: 300249 - DNA, 20 bp, synthetic construct
  source 1..20: mol_type = other DNA
gaggctcttggtggagagtt

SEQ ID NO: 300250 - DNA, 20 bp, synthetic construct
  source 1..20: mol_type = other DNA
ggaggctcttggtggagagt

SEQ ID NO: 300251 - DNA, 20 bp, synthetic construct
  source 1..20: mol_type = other DNA
gggaggctcttggtggagag

SEQ ID NO: 300252 - DNA, 20 bp, synthetic construct
  source 1..20: mol_type = other DNA
agggaggctcttggtggaga

SEQ ID NO: 300253 - DNA, 20 bp, synthetic construct
  source 1..20: mol_type = other DNA
cagggaggctcttggtggag

SEQ ID NO: 300254 - DNA, 20 bp, synthetic construct
  source 1..20: mol_type = other DNA
gcagggaggctcttggtgga

SEQ ID NO: 300255 - DNA, 20 bp, synthetic construct
  source 1..20: mol_type = other DNA
ggcagggaggctcttggtgg

SEQ ID NO: 300256 - DNA, 20 bp, synthetic construct
  source 1..20: mol_type = other DNA
cggcagggaggctcttggtg

SEQ ID NO: 300257 - DNA, 20 bp, synthetic construct
  source 1..20: mol_type = other DNA
acggcagggaggctcttggt

SEQ ID NO: 300258 - DNA, 20 bp, synthetic construct
  source 1..20: mol_type = other DNA
aacggcagggaggctcttgg

SEQ ID NO: 300259 - DNA, 20 bp, synthetic construct
  source 1..20: mol_type = other DNA
gaacggcagggaggctcttg

SEQ ID NO: 300260 - DNA, 20 bp, synthetic construct
  source 1..20: mol_type = other DNA
cgaacggcagggaggctctt

SEQ ID NO: 300261 - DNA, 20 bp, synthetic construct
  source 1..20: mol_type = other DNA
gcgaacggcagggaggctct

SEQ ID NO: 300262 - DNA, 20 bp, synthetic construct
  source 1..20: mol_type = other DNA
agcgaacggcagggaggctc

SEQ ID NO: 300263 - DNA, 20 bp, synthetic construct
  source 1..20: mol_type = other DNA
cagcgaacggcagggaggct

SEQ ID NO: 300264 - DNA, 20 bp, synthetic construct
  source 1..20: mol_type = other DNA
tcagcgaacggcagggaggc

SEQ ID NO: 300265 - DNA, 20 bp, synthetic construct
  source 1..20: mol_type = other DNA
ctcagcgaacggcagggagg

SEQ ID NO: 300266 - DNA, 20 bp, synthetic construct
  source 1..20: mol_type = other DNA
actcagcgaacggcagggag

SEQ ID NO: 300267 - DNA, 20 bp, synthetic construct
  source 1..20: mol_type = other DNA
gactcagcgaacggcaggga

SEQ ID NO: 300268 - DNA, 20 bp, synthetic construct
  source 1..20: mol_type = other DNA
ggactcagcgaacggcaggg

SEQ ID NO: 300269 - DNA, 20 bp, synthetic construct
  source 1..20: mol_type = other DNA
gggactcagcgaacggcagg

SEQ ID NO: 300270 - DNA, 20 bp, synthetic construct
  source 1..20: mol_type = other DNA
tgggactcagcgaacggcag

SEQ ID NO: 300271 - DNA, 20 bp, synthetic construct
  source 1..20: mol_type = other DNA
ctgggactcagcgaacggca

SEQ ID NO: 300272 - DNA, 20 bp, synthetic construct
  source 1..20: mol_type = other DNA
gctgggactcagcgaacggc

SEQ ID NO: 300273 - DNA, 20 bp, synthetic construct
  source 1..20: mol_type = other DNA
tgctgggactcagcgaacgg

SEQ ID NO: 300274 - DNA, 20 bp, synthetic construct
  source 1..20: mol_type = other DNA
ttgctgggactcagcgaacg

SEQ ID NO: 300275 - DNA, 20 bp, synthetic construct
  source 1..20: mol_type = other DNA
attgctgggactcagcgaac

SEQ ID NO: 300276 - DNA, 20 bp, synthetic construct
  source 1..20: mol_type = other DNA
aattgctgggactcagcgaa

SEQ ID NO: 300277 - DNA, 20 bp, synthetic construct
  source 1..20: mol_type = other DNA
gaattgctgggactcagcga

SEQ ID NO: 300278 - DNA, 20 bp, synthetic construct
  source 1..20: mol_type = other DNA
agaattgctgggactcagcg

SEQ ID NO: 300279 - DNA, 20 bp, synthetic construct
  source 1..20: mol_type = other DNA
gagaattgctgggactcagc

SEQ ID NO: 300280 - DNA, 20 bp, synthetic construct
  source 1..20: mol_type = other DNA
ggagaattgctgggactcag

SEQ ID NO: 300281 - DNA, 20 bp, synthetic construct
  source 1..20: mol_type = other DNA
aggagaattgctgggactca

SEQ ID NO: 300282 - DNA, 20 bp, synthetic construct
  source 1..20: mol_type = other DNA
taggagaattgctgggactc

SEQ ID NO: 300283 - DNA, 20 bp, synthetic construct
  source 1..20: mol_type = other DNA
ttaggagaattgctgggact

SEQ ID NO: 300284 - DNA, 20 bp, synthetic construct
  source 1..20: mol_type = other DNA
cttaggagaattgctgggac

SEQ ID NO: 300285 - DNA, 20 bp, synthetic construct
  source 1..20: mol_type = other DNA
acttaggagaattgctggga

SEQ ID NO: 300286 - DNA, 20 bp, synthetic construct
  source 1..20: mol_type = other DNA
aacttaggagaattgctggg

SEQ ID NO: 300287 - DNA, 20 bp, synthetic construct
  source 1..20: mol_type = other DNA
caacttaggagaattgctgg

SEQ ID NO: 300288 - DNA, 20 bp, synthetic construct
  source 1..20: mol_type = other DNA
tcaacttaggagaattgctg

SEQ ID NO: 300289 - DNA, 20 bp, synthetic construct
  source 1..20: mol_type = other DNA
ttcaacttaggagaattgct

SEQ ID NO: 300290 - DNA, 20 bp, synthetic construct
  source 1..20: mol_type = other DNA
cttcaacttaggagaattgc

SEQ ID NO: 300291 - DNA, 20 bp, synthetic construct
  source 1..20: mol_type = other DNA
ccttcaacttaggagaattg

SEQ ID NO: 300292 - DNA, 20 bp, synthetic construct
  source 1..20: mol_type = other DNA
cccttcaacttaggagaatt

SEQ ID NO: 300293 - DNA, 20 bp, synthetic construct
  source 1..20: mol_type = other DNA
tcccttcaacttaggagaat

SEQ ID NO: 300294 - DNA, 20 bp, synthetic construct
  source 1..20: mol_type = other DNA
atcccttcaacttaggagaa

SEQ ID NO: 300295 - DNA, 20 bp, synthetic construct
  source 1..20: mol_type = other DNA
gatcccttcaacttaggaga

SEQ ID NO: 300296 - DNA, 20 bp, synthetic construct
  source 1..20: mol_type = other DNA
agatcccttcaacttaggag

SEQ ID NO: 300297 - DNA, 20 bp, synthetic construct
  source 1..20: mol_type = other DNA
cagatcccttcaacttagga

SEQ ID NO: 300298 - DNA, 20 bp, synthetic construct
  source 1..20: mol_type = other DNA
tcagatcccttcaacttagg

SEQ ID NO: 300299 - DNA, 20 bp, synthetic construct
  source 1..20: mol_type = other DNA
ctcagatcccttcaacttag

SEQ ID NO: 300300 - DNA, 20 bp, synthetic construct
  source 1..20: mol_type = other DNA
tctcagatcccttcaactta

SEQ ID NO: 300301 - DNA, 20 bp, synthetic construct
  source 1..20: mol_type = other DNA
ttctcagatcccttcaactt

SEQ ID NO: 300302 - DNA, 20 bp, synthetic construct
  source 1..20: mol_type = other DNA
cttctcagatcccttcaact

SEQ ID NO: 300303 - DNA, 20 bp, synthetic construct
  source 1..20: mol_type = other DNA
ccttctcagatcccttcaac

SEQ ID NO: 300304 - DNA, 20 bp, synthetic construct
  source 1..20: mol_type = other DNA
tccttctcagatcccttcaa

SEQ ID NO: 300305 - DNA, 20 bp, synthetic construct
  source 1..20: mol_type = other DNA
ctccttctcagatcccttca

SEQ ID NO: 300306 - DNA, 20 bp, synthetic construct
  source 1..20: mol_type = other DNA
tctccttctcagatcccttc

SEQ ID NO: 300307 - DNA, 20 bp, synthetic construct
  source 1..20: mol_type = other DNA
ttctccttctcagatccctt

SEQ ID NO: 300308 - DNA, 20 bp, synthetic construct
  source 1..20: mol_type = other DNA
cttctccttctcagatccct

SEQ ID NO: 300309 - DNA, 20 bp, synthetic construct
  source 1..20: mol_type = other DNA
ccttctccttctcagatccc

SEQ ID NO: 300310 - DNA, 20 bp, synthetic construct
  source 1..20: mol_type = other DNA
tccttctccttctcagatcc

SEQ ID NO: 300311 - DNA, 20 bp, synthetic construct
  source 1..20: mol_type = other DNA
ttccttctccttctcagatc

SEQ ID NO: 300312 - DNA, 20 bp, synthetic construct
  source 1..20: mol_type = other DNA
tttccttctccttctcagat

SEQ ID NO: 300313 - DNA, 20 bp, synthetic construct
  source 1..20: mol_type = other DNA
atttccttctccttctcaga

SEQ ID NO: 300314 - DNA, 20 bp, synthetic construct
  source 1..20: mol_type = other DNA
catttccttctccttctcag

SEQ ID NO: 300315 - DNA, 20 bp, synthetic construct
  source 1..20: mol_type = other DNA
acatttccttctccttctca

SEQ ID NO: 300316 - DNA, 20 bp, synthetic construct
  source 1..20: mol_type = other DNA
cacatttccttctccttctc

SEQ ID NO: 300317 - DNA, 20 bp, synthetic construct
  source 1..20: mol_type = other DNA
ccacatttccttctccttct

SEQ ID NO: 300318 - DNA, 20 bp, synthetic construct
  source 1..20: mol_type = other DNA
cccacatttccttctccttc

SEQ ID NO: 300319 - DNA, 20 bp, synthetic construct
  source 1..20: mol_type = other DNA
ccccacatttccttctcctt

SEQ ID NO: 300320 - DNA, 20 bp, synthetic construct
  source 1..20: mol_type = other DNA
accccacatttccttctcct

SEQ ID NO: 300321 - DNA, 20 bp, synthetic construct
  source 1..20: mol_type = other DNA
taccccacatttccttctcc

SEQ ID NO: 300322 - DNA, 20 bp, synthetic construct
  source 1..20: mol_type = other DNA
ctaccccacatttccttctc

SEQ ID NO: 300323 - DNA, 20 bp, synthetic construct
  source 1..20: mol_type = other DNA
tctaccccacatttccttct

SEQ ID NO: 300324 - DNA, 20 bp, synthetic construct
  source 1..20: mol_type = other DNA
atctaccccacatttccttc

SEQ ID NO: 300325 - DNA, 20 bp, synthetic construct
  source 1..20: mol_type = other DNA
aatctaccccacatttcctt

SEQ ID NO: 300326 - DNA, 20 bp, synthetic construct
  source 1..20: mol_type = other DNA
aaatctaccccacatttcct

SEQ ID NO: 300327 - DNA, 20 bp, synthetic construct
  source 1..20: mol_type = other DNA
caaatctaccccacatttcc

SEQ ID NO: 300328 - DNA, 20 bp, synthetic construct
  source 1..20: mol_type = other DNA
ccaaatctaccccacatttc

SEQ ID NO: 300329 - DNA, 20 bp, synthetic construct
  source 1..20: mol_type = other DNA
accaaatctaccccacattt

SEQ ID NO: 300330 - DNA, 20 bp, synthetic construct
  source 1..20: mol_type = other DNA
caccaaatctaccccacatt

SEQ ID NO: 300331 - DNA, 20 bp, synthetic construct
  source 1..20: mol_type = other DNA
ccaccaaatctaccccacat

SEQ ID NO: 300332 - DNA, 20 bp, synthetic construct
  source 1..20: mol_type = other DNA
accaccaaatctaccccaca

SEQ ID NO: 300333 - DNA, 20 bp, synthetic construct
  source 1..20: mol_type = other DNA
caccaccaaatctaccccac

SEQ ID NO: 300334 - DNA, 20 bp, synthetic construct
  source 1..20: mol_type = other DNA
ccaccaccaaatctacccca

SEQ ID NO: 300335 - DNA, 20 bp, synthetic construct
  source 1..20: mol_type = other DNA
accaccaccaaatctacccc

SEQ ID NO: 300336 - DNA, 20 bp, synthetic construct
  source 1..20: mol_type = other DNA
aaccaccaccaaatctaccc

SEQ ID NO: 300337 - DNA, 20 bp, synthetic construct
  source 1..20: mol_type = other DNA
taaccaccaccaaatctacc

SEQ ID NO: 300338 - DNA, 20 bp, synthetic construct
  source 1..20: mol_type = other DNA
ctaaccaccaccaaatctac

SEQ ID NO: 300339 - DNA, 20 bp, synthetic construct
  source 1..20: mol_type = other DNA
tctaaccaccaccaaatcta

SEQ ID NO: 300340 - DNA, 20 bp, synthetic construct
  source 1..20: mol_type = other DNA
ctctaaccaccaccaaatct

SEQ ID NO: 300341 - DNA, 20 bp, synthetic construct
  source 1..20: mol_type = other DNA
tctctaaccaccaccaaatc

SEQ ID NO: 300342 - DNA, 20 bp, synthetic construct
  source 1..20: mol_type = other DNA
atctctaaccaccaccaaat

SEQ ID NO: 300343 - DNA, 20 bp, synthetic construct
  source 1..20: mol_type = other DNA
tatctctaaccaccaccaaa

SEQ ID NO: 300344 - DNA, 20 bp, synthetic construct
  source 1..20: mol_type = other DNA
atatctctaaccaccaccaa

SEQ ID NO: 300345 - DNA, 20 bp, synthetic construct
  source 1..20: mol_type = other DNA
catatctctaaccaccacca

SEQ ID NO: 300346 - DNA, 20 bp, synthetic construct
  source 1..20: mol_type = other DNA
gcatatctctaaccaccacc

SEQ ID NO: 300347 - DNA, 20 bp, synthetic construct
  source 1..20: mol_type = other DNA
ggcatatctctaaccaccac

SEQ ID NO: 300348 - DNA, 20 bp, synthetic construct
  source 1..20: mol_type = other DNA
gggcatatctctaaccacca

SEQ ID NO: 300349 - DNA, 20 bp, synthetic construct
  source 1..20: mol_type = other DNA
ggggcatatctctaaccacc

SEQ ID NO: 300350 - DNA, 20 bp, synthetic construct
  source 1..20: mol_type = other DNA
gggggcatatctctaaccac

SEQ ID NO: 300351 - DNA, 20 bp, synthetic construct
  source 1..20: mol_type = other DNA
ggggggcatatctctaacca

SEQ ID NO: 300352 - DNA, 20 bp, synthetic construct
  source 1..20: mol_type = other DNA
aggggggcatatctctaacc

SEQ ID NO: 300353 - DNA, 20 bp, synthetic construct
  source 1..20: mol_type = other DNA
gaggggggcatatctctaac

SEQ ID NO: 300354 - DNA, 20 bp, synthetic construct
  source 1..20: mol_type = other DNA
tgaggggggcatatctctaa

SEQ ID NO: 300355 - DNA, 20 bp, synthetic construct
  source 1..20: mol_type = other DNA
atgaggggggcatatctcta

SEQ ID NO: 300356 - DNA, 20 bp, synthetic construct
  source 1..20: mol_type = other DNA
aatgaggggggcatatctct

SEQ ID NO: 300357 - DNA, 20 bp, synthetic construct
  source 1..20: mol_type = other DNA
taatgaggggggcatatctc

SEQ ID NO: 300358 - DNA, 20 bp, synthetic construct
  source 1..20: mol_type = other DNA
gtaatgaggggggcatatct

SEQ ID NO: 300359 - DNA, 20 bp, synthetic construct
  source 1..20: mol_type = other DNA
agtaatgaggggggcatatc

SEQ ID NO: 300360 - DNA, 20 bp, synthetic construct
  source 1..20: mol_type = other DNA
cagtaatgaggggggcatat

SEQ ID NO: 300361 - DNA, 20 bp, synthetic construct
  source 1..20: mol_type = other DNA
gcagtaatgaggggggcata

SEQ ID NO: 300362 - DNA, 20 bp, synthetic construct
  source 1..20: mol_type = other DNA
ggcagtaatgaggggggcat

SEQ ID NO: 300363 - DNA, 20 bp, synthetic construct
  source 1..20: mol_type = other DNA
tggcagtaatgaggggggca

SEQ ID NO: 300364 - DNA, 20 bp, synthetic construct
  source 1..20: mol_type = other DNA
ttggcagtaatgaggggggc

SEQ ID NO: 300365 - DNA, 20 bp, synthetic construct
  source 1..20: mol_type = other DNA
gttggcagtaatgagggggg

SEQ ID NO: 300366 - DNA, 20 bp, synthetic construct
  source 1..20: mol_type = other DNA
tgttggcagtaatgaggggg

SEQ ID NO: 300367 - DNA, 20 bp, synthetic construct
  source 1..20: mol_type = other DNA
ctgttggcagtaatgagggg

SEQ ID NO: 300368 - DNA, 20 bp, synthetic construct
  source 1..20: mol_type = other DNA
actgttggcagtaatgaggg

SEQ ID NO: 300369 - DNA, 20 bp, synthetic construct
  source 1..20: mol_type = other DNA
aactgttggcagtaatgagg

SEQ ID NO: 300370 - DNA, 20 bp, synthetic construct
  source 1..20: mol_type = other DNA
aaactgttggcagtaatgag

SEQ ID NO: 300371 - DNA, 20 bp, synthetic construct
  source 1..20: mol_type = other DNA
gaaactgttggcagtaatga

SEQ ID NO: 300372 - DNA, 20 bp, synthetic construct
  source 1..20: mol_type = other DNA
cgaaactgttggcagtaatg

SEQ ID NO: 300373 - DNA, 20 bp, synthetic construct
  source 1..20: mol_type = other DNA
ccgaaactgttggcagtaat

SEQ ID NO: 300374 - DNA, 20 bp, synthetic construct
  source 1..20: mol_type = other DNA
gccgaaactgttggcagtaa

SEQ ID NO: 300375 - DNA, 20 bp, synthetic construct
  source 1..20: mol_type = other DNA
agccgaaactgttggcagta

SEQ ID NO: 300376 - DNA, 20 bp, synthetic construct
  source 1..20: mol_type = other DNA
cagccgaaactgttggcagt

SEQ ID NO: 300377 - DNA, 20 bp, synthetic construct
  source 1..20: mol_type = other DNA
gcagccgaaactgttggcag

SEQ ID NO: 300378 - DNA, 20 bp, synthetic construct
  source 1..20: mol_type = other DNA
tgcagccgaaactgttggca

SEQ ID NO: 300379 - DNA, 20 bp, synthetic construct
  source 1..20: mol_type = other DNA
atgcagccgaaactgttggc

SEQ ID NO: 300380 - DNA, 20 bp, synthetic construct
  source 1..20: mol_type = other DNA
aatgcagccgaaactgttgg

SEQ ID NO: 300381 - DNA, 20 bp, synthetic construct
  source 1..20: mol_type = other DNA
aaatgcagccgaaactgttg

SEQ ID NO: 300382 - DNA, 20 bp, synthetic construct
  source 1..20: mol_type = other DNA
gaaatgcagccgaaactgtt

SEQ ID NO: 300383 - DNA, 20 bp, synthetic construct
  source 1..20: mol_type = other DNA
agaaatgcagccgaaactgt

SEQ ID NO: 300384 - DNA, 20 bp, synthetic construct
  source 1..20: mol_type = other DNA
aagaaatgcagccgaaactg

SEQ ID NO: 300385 - DNA, 20 bp, synthetic construct
  source 1..20: mol_type = other DNA
gaagaaatgcagccgaaact

SEQ ID NO: 300386 - DNA, 20 bp, synthetic construct
  source 1..20: mol_type = other DNA
tgaagaaatgcagccgaaac

SEQ ID NO: 300387 - DNA, 20 bp, synthetic construct
  source 1..20: mol_type = other DNA
gtgaagaaatgcagccgaaa

SEQ ID NO: 300388 - DNA, 20 bp, synthetic construct
  source 1..20: mol_type = other DNA
cgtgaagaaatgcagccgaa

SEQ ID NO: 300389 - DNA, 20 bp, synthetic construct
  source 1..20: mol_type = other DNA
gcgtgaagaaatgcagccga

SEQ ID NO: 300390 - DNA, 20 bp, synthetic construct
  source 1..20: mol_type = other DNA
tgcgtgaagaaatgcagccg

SEQ ID NO: 300391 - DNA, 20 bp, synthetic construct
  source 1..20: mol_type = other DNA
gtgcgtgaagaaatgcagcc

SEQ ID NO: 300392 - DNA, 20 bp, synthetic construct
  source 1..20: mol_type = other DNA
ggtgcgtgaagaaatgcagc

SEQ ID NO: 300393 - DNA, 20 bp, synthetic construct
  source 1..20: mol_type = other DNA
aggtgcgtgaagaaatgcag

SEQ ID NO: 300394 - DNA, 20 bp, synthetic construct
  source 1..20: mol_type = other DNA
gaggtgcgtgaagaaatgca

SEQ ID NO: 300395 - DNA, 20 bp, synthetic construct
  source 1..20: mol_type = other DNA
cgaggtgcgtgaagaaatgc

SEQ ID NO: 300396 - DNA, 20 bp, synthetic construct
  source 1..20: mol_type = other DNA
ccgaggtgcgtgaagaaatg

SEQ ID NO: 300397 - DNA, 20 bp, synthetic construct
  source 1..20: mol_type = other DNA
accgaggtgcgtgaagaaat

SEQ ID NO: 300398 - DNA, 20 bp, synthetic construct
  source 1..20: mol_type = other DNA
aaccgaggtgcgtgaagaaa

SEQ ID NO: 300399 - DNA, 20 bp, synthetic construct
  source 1..20: mol_type = other DNA
gaaccgaggtgcgtgaagaa

SEQ ID NO: 300400 - DNA, 20 bp, synthetic construct
  source 1..20: mol_type = other DNA
ggaaccgaggtgcgtgaaga

SEQ ID NO: 300401 - DNA, 20 bp, synthetic construct
  source 1..20: mol_type = other DNA
aggaaccgaggtgcgtgaag

SEQ ID NO: 300402 - DNA, 20 bp, synthetic construct
  source 1..20: mol_type = other DNA
gaggaaccgaggtgcgtgaa

SEQ ID NO: 300403 - DNA, 20 bp, synthetic construct
  source 1..20: mol_type = other DNA
agaggaaccgaggtgcgtga

SEQ ID NO: 300404 - DNA, 20 bp, synthetic construct
  source 1..20: mol_type = other DNA
aagaggaaccgaggtgcgtg

SEQ ID NO: 300405 - DNA, 20 bp, synthetic construct
  source 1..20: mol_type = other DNA
gaagaggaaccgaggtgcgt

SEQ ID NO: 300406 - DNA, 20 bp, synthetic construct
  source 1..20: mol_type = other DNA
ggaagaggaaccgaggtgcg

SEQ ID NO: 300407 - DNA, 20 bp, synthetic construct
  source 1..20: mol_type = other DNA
aggaagaggaaccgaggtgc

SEQ ID NO: 300408 - DNA, 20 bp, synthetic construct
  source 1..20: mol_type = other DNA
caggaagaggaaccgaggtg

SEQ ID NO: 300409 - DNA, 20 bp, synthetic construct
  source 1..20: mol_type = other DNA
tcaggaagaggaaccgaggt

SEQ ID NO: 300410 - DNA, 20 bp, synthetic construct
  source 1..20: mol_type = other DNA
ttcaggaagaggaaccgagg

SEQ ID NO: 300411 - DNA, 20 bp, synthetic construct
  source 1..20: mol_type = other DNA
cttcaggaagaggaaccgag

SEQ ID NO: 300412 - DNA, 20 bp, synthetic construct
  source 1..20: mol_type = other DNA
acttcaggaagaggaaccga

SEQ ID NO: 300413 - DNA, 20 bp, synthetic construct
  source 1..20: mol_type = other DNA
aacttcaggaagaggaaccg

SEQ ID NO: 300414 - DNA, 20 bp, synthetic construct
  source 1..20: mol_type = other DNA
gaacttcaggaagaggaacc

SEQ ID NO: 300415 - DNA, 20 bp, synthetic construct
  source 1..20: mol_type = other DNA
agaacttcaggaagaggaac

SEQ ID NO: 300416 - DNA, 20 bp, synthetic construct
  source 1..20: mol_type = other DNA
aagaacttcaggaagaggaa

SEQ ID NO: 300417 - DNA, 20 bp, synthetic construct
  source 1..20: mol_type = other DNA
caagaacttcaggaagagga

SEQ ID NO: 300418 - DNA, 20 bp, synthetic construct
  source 1..20: mol_type = other DNA
acaagaacttcaggaagagg

SEQ ID NO: 300419 - DNA, 20 bp, synthetic construct
  source 1..20: mol_type = other DNA
cacaagaacttcaggaagag

SEQ ID NO: 300420 - DNA, 20 bp, synthetic construct
  source 1..20: mol_type = other DNA
gcacaagaacttcaggaaga

SEQ ID NO: 300421 - DNA, 20 bp, synthetic construct
  source 1..20: mol_type = other DNA
ggcacaagaacttcaggaag

SEQ ID NO: 300422 - DNA, 20 bp, synthetic construct
  source 1..20: mol_type = other DNA
gggcacaagaacttcaggaa

SEQ ID NO: 300423 - DNA, 20 bp, synthetic construct
  source 1..20: mol_type = other DNA
agggcacaagaacttcagga

SEQ ID NO: 300424 - DNA, 20 bp, synthetic construct
  source 1..20: mol_type = other DNA
cagggcacaagaacttcagg

SEQ ID NO: 300425 - DNA, 20 bp, synthetic construct
  source 1..20: mol_type = other DNA
gcagggcacaagaacttcag

SEQ ID NO: 300426 - DNA, 20 bp, synthetic construct
  source 1..20: mol_type = other DNA
agcagggcacaagaacttca

SEQ ID NO: 300427 - DNA, 20 bp, synthetic construct
  source 1..20: mol_type = other DNA
gagcagggcacaagaacttc

SEQ ID NO: 300428 - DNA, 20 bp, synthetic construct
  source 1..20: mol_type = other DNA
agagcagggcacaagaactt

SEQ ID NO: 300429 - DNA, 20 bp, synthetic construct
  source 1..20: mol_type = other DNA
aagagcagggcacaagaact

SEQ ID NO: 300430 - DNA, 20 bp, synthetic construct
  source 1..20: mol_type = other DNA
gaagagcagggcacaagaac

SEQ ID NO: 300431 - DNA, 20 bp, synthetic construct
  source 1..20: mol_type = other DNA
tgaagagcagggcacaagaa

SEQ ID NO: 300432 - DNA, 20 bp, synthetic construct
  source 1..20: mol_type = other DNA
ctgaagagcagggcacaaga

SEQ ID NO: 300433 - DNA, 20 bp, synthetic construct
  source 1..20: mol_type = other DNA
gctgaagagcagggcacaag

SEQ ID NO: 300434 - DNA, 20 bp, synthetic construct
  source 1..20: mol_type = other DNA
tgctgaagagcagggcacaa

SEQ ID NO: 300435 - DNA, 20 bp, synthetic construct
  source 1..20: mol_type = other DNA
gtgctgaagagcagggcaca

SEQ ID NO: 300436 - DNA, 20 bp, synthetic construct
  source 1..20: mol_type = other DNA
ggtgctgaagagcagggcac

SEQ ID NO: 300437 - DNA, 20 bp, synthetic construct
  source 1..20: mol_type = other DNA
tggtgctgaagagcagggca

SEQ ID NO: 300438 - DNA, 20 bp, synthetic construct
  source 1..20: mol_type = other DNA
atggtgctgaagagcagggc

SEQ ID NO: 300439 - DNA, 20 bp, synthetic construct
  source 1..20: mol_type = other DNA
catggtgctgaagagcaggg

SEQ ID NO: 300440 - DNA, 20 bp, synthetic construct
  source 1..20: mol_type = other DNA
ccatggtgctgaagagcagg

SEQ ID NO: 300441 - DNA, 20 bp, synthetic construct
  source 1..20: mol_type = other DNA
cccatggtgctgaagagcag

SEQ ID NO: 300442 - DNA, 20 bp, synthetic construct
  source 1..20: mol_type = other DNA
gcccatggtgctgaagagca

SEQ ID NO: 300443 - DNA, 20 bp, synthetic construct
  source 1..20: mol_type = other DNA
ggcccatggtgctgaagagc

SEQ ID NO: 300444 - DNA, 20 bp, synthetic construct
  source 1..20: mol_type = other DNA
aggcccatggtgctgaagag

SEQ ID NO: 300445 - DNA, 20 bp, synthetic construct
  source 1..20: mol_type = other DNA
aaggcccatggtgctgaaga

SEQ ID NO: 300446 - DNA, 20 bp, synthetic construct
  source 1..20: mol_type = other DNA
gaaggcccatggtgctgaag

SEQ ID NO: 300447 - DNA, 20 bp, synthetic construct
  source 1..20: mol_type = other DNA
agaaggcccatggtgctgaa

SEQ ID NO: 300448 - DNA, 20 bp, synthetic construct
  source 1..20: mol_type = other DNA
aagaaggcccatggtgctga

SEQ ID NO: 300449 - DNA, 20 bp, synthetic construct
  source 1..20: mol_type = other DNA
taagaaggcccatggtgctg

SEQ ID NO: 300450 - DNA, 20 bp, synthetic construct
  source 1..20: mol_type = other DNA
ataagaaggcccatggtgct

SEQ ID NO: 300451 - DNA, 20 bp, synthetic construct
  source 1..20: mol_type = other DNA
tataagaaggcccatggtgc

SEQ ID NO: 300452 - DNA, 20 bp, synthetic construct
  source 1..20: mol_type = other DNA
gtataagaaggcccatggtg

SEQ ID NO: 300453 - DNA, 20 bp, synthetic construct
  source 1..20: mol_type = other DNA
cgtataagaaggcccatggt

SEQ ID NO: 300454 - DNA, 20 bp, synthetic construct
  source 1..20: mol_type = other DNA
ccgtataagaaggcccatgg

SEQ ID NO: 300455 - DNA, 20 bp, synthetic construct
  source 1..20: mol_type = other DNA
tccgtataagaaggcccatg

SEQ ID NO: 300456 - DNA, 20 bp, synthetic construct
  source 1..20: mol_type = other DNA
ttccgtataagaaggcccat

SEQ ID NO: 300457 - DNA, 20 bp, synthetic construct
  source 1..20: mol_type = other DNA
cttccgtataagaaggccca

SEQ ID NO: 300458 - DNA, 20 bp, synthetic construct
  source 1..20: mol_type = other DNA
ccttccgtataagaaggccc

SEQ ID NO: 300459 - DNA, 20 bp, synthetic construct
  source 1..20: mol_type = other DNA
gccttccgtataagaaggcc

SEQ ID NO: 300460 - DNA, 20 bp, synthetic construct
  source 1..20: mol_type = other DNA
agccttccgtataagaaggc

SEQ ID NO: 300461 - DNA, 20 bp, synthetic construct
  source 1..20: mol_type = other DNA
gagccttccgtataagaagg

SEQ ID NO: 300462 - DNA, 20 bp, synthetic construct
  source 1..20: mol_type = other DNA
agagccttccgtataagaag

SEQ ID NO: 300463 - DNA, 20 bp, synthetic construct
  source 1..20: mol_type = other DNA
cagagccttccgtataagaa

SEQ ID NO: 300464 - DNA, 20 bp, synthetic construct
  source 1..20: mol_type = other DNA
ccagagccttccgtataaga

SEQ ID NO: 300465 - DNA, 20 bp, synthetic construct
  source 1..20: mol_type = other DNA
cccagagccttccgtataag

SEQ ID NO: 300466 - DNA, 20 bp, synthetic construct
  source 1..20: mol_type = other DNA
tcccagagccttccgtataa

SEQ ID NO: 300467 - DNA, 20 bp, synthetic construct
  source 1..20: mol_type = other DNA
atcccagagccttccgtata

SEQ ID NO: 300468 - DNA, 20 bp, synthetic construct
  source 1..20: mol_type = other DNA
gatcccagagccttccgtat

SEQ ID NO: 300469 - DNA, 20 bp, synthetic construct
  source 1..20: mol_type = other DNA
agatcccagagccttccgta

SEQ ID NO: 300470 - DNA, 20 bp, synthetic construct
  source 1..20: mol_type = other DNA
gagatcccagagccttccgt

SEQ ID NO: 300471 - DNA, 20 bp, synthetic construct
  source 1..20: mol_type = other DNA
ggagatcccagagccttccg

SEQ ID NO: 300472 - DNA, 20 bp, synthetic construct
  source 1..20: mol_type = other DNA
gggagatcccagagccttcc

SEQ ID NO: 300473 - DNA, 20 bp, synthetic construct
  source 1..20: mol_type = other DNA
ggggagatcccagagccttc

SEQ ID NO: 300474 - DNA, 20 bp, synthetic construct
  source 1..20: mol_type = other DNA
gggggagatcccagagcctt

SEQ ID NO: 300475 - DNA, 20 bp, synthetic construct
  source 1..20: mol_type = other DNA
agggggagatcccagagcct

SEQ ID NO: 300476 - DNA, 20 bp, synthetic construct
  source 1..20: mol_type = other DNA
aagggggagatcccagagcc

SEQ ID NO: 300477 - DNA, 20 bp, synthetic construct
  source 1..20: mol_type = other DNA
caagggggagatcccagagc

SEQ ID NO: 300478 - DNA, 20 bp, synthetic construct
  source 1..20: mol_type = other DNA
acaagggggagatcccagag

SEQ ID NO: 300479 - DNA, 20 bp, synthetic construct
  source 1..20: mol_type = other DNA
cacaagggggagatcccaga

SEQ ID NO: 300480 - DNA, 20 bp, synthetic construct
  source 1..20: mol_type = other DNA
ccacaagggggagatcccag

SEQ ID NO: 300481 - DNA, 20 bp, synthetic construct
  source 1..20: mol_type = other DNA
cccacaagggggagatccca

SEQ ID NO: 300482 - DNA, 20 bp, synthetic construct
  source 1..20: mol_type = other DNA
ccccacaagggggagatccc

SEQ ID NO: 300483 - DNA, 20 bp, synthetic construct
  source 1..20: mol_type = other DNA
gccccacaagggggagatcc

SEQ ID NO: 300484 - DNA, 20 bp, synthetic construct
  source 1..20: mol_type = other DNA
tgccccacaagggggagatc

SEQ ID NO: 300485 - DNA, 20 bp, synthetic construct
  source 1..20: mol_type = other DNA
ctgccccacaagggggagat

SEQ ID NO: 300486 - DNA, 20 bp, synthetic construct
  source 1..20: mol_type = other DNA
cctgccccacaagggggaga

SEQ ID NO: 300487 - DNA, 20 bp, synthetic construct
  source 1..20: mol_type = other DNA
gcctgccccacaagggggag

SEQ ID NO: 300488 - DNA, 20 bp, synthetic construct
  source 1..20: mol_type = other DNA
agcctgccccacaaggggga

SEQ ID NO: 300489 - DNA, 20 bp, synthetic construct
  source 1..20: mol_type = other DNA
gagcctgccccacaaggggg

SEQ ID NO: 300490 - DNA, 20 bp, synthetic construct
  source 1..20: mol_type = other DNA
agagcctgccccacaagggg

SEQ ID NO: 300491 - DNA, 20 bp, synthetic construct
  source 1..20: mol_type = other DNA
aagagcctgccccacaaggg

SEQ ID NO: 300492 - DNA, 20 bp, synthetic construct
  source 1..20: mol_type = other DNA
caagagcctgccccacaagg

SEQ ID NO: 300493 - DNA, 20 bp, synthetic construct
  source 1..20: mol_type = other DNA
ccaagagcctgccccacaag

SEQ ID NO: 300494 - DNA, 20 bp, synthetic construct
  source 1..20: mol_type = other DNA
cccaagagcctgccccacaa

SEQ ID NO: 300495 - DNA, 20 bp, synthetic construct
  source 1..20: mol_type = other DNA
ccccaagagcctgccccaca

SEQ ID NO: 300496 - DNA, 20 bp, synthetic construct
  source 1..20: mol_type = other DNA
gccccaagagcctgccccac

SEQ ID NO: 300497 - DNA, 20 bp, synthetic construct
  source 1..20: mol_type = other DNA
ggccccaagagcctgcccca

SEQ ID NO: 300498 - DNA, 20 bp, synthetic construct
  source 1..20: mol_type = other DNA
tggccccaagagcctgcccc

SEQ ID NO: 300499 - DNA, 20 bp, synthetic construct
  source 1..20: mol_type = other DNA
ctggccccaagagcctgccc

SEQ ID NO: 300500 - DNA, 20 bp, synthetic construct
  source 1..20: mol_type = other DNA
gctggccccaagagcctgcc

SEQ ID NO: 300501 - DNA, 20 bp, synthetic construct
  source 1..20: mol_type = other DNA
ggctggccccaagagcctgc

SEQ ID NO: 300502 - DNA, 20 bp, synthetic construct
  source 1..20: mol_type = other DNA
aggctggccccaagagcctg

SEQ ID NO: 300503 - DNA, 20 bp, synthetic construct
  source 1..20: mol_type = other DNA
taggctggccccaagagcct

SEQ ID NO: 300504 - DNA, 20 bp, synthetic construct
  source 1..20: mol_type = other DNA
ttaggctggccccaagagcc

SEQ ID NO: 300505 - DNA, 20 bp, synthetic construct
  source 1..20: mol_type = other DNA
cttaggctggccccaagagc

SEQ ID NO: 300506 - DNA, 20 bp, synthetic construct
  source 1..20: mol_type = other DNA
tcttaggctggccccaagag

SEQ ID NO: 300507 - DNA, 20 bp, synthetic construct
  source 1..20: mol_type = other DNA
atcttaggctggccccaaga

SEQ ID NO: 300508 - DNA, 20 bp, synthetic construct
  source 1..20: mol_type = other DNA
gatcttaggctggccccaag

SEQ ID NO: 300509 - DNA, 20 bp, synthetic construct
  source 1..20: mol_type = other DNA
tgatcttaggctggccccaa

SEQ ID NO: 300510 - DNA, 20 bp, synthetic construct
  source 1..20: mol_type = other DNA
atgatcttaggctggcccca

SEQ ID NO: 300511 - DNA, 20 bp, synthetic construct
  source 1..20: mol_type = other DNA
catgatcttaggctggcccc

SEQ ID NO: 300512 - DNA, 20 bp, synthetic construct
  source 1..20: mol_type = other DNA
ccatgatcttaggctggccc

SEQ ID NO: 300513 - DNA, 20 bp, synthetic construct
  source 1..20: mol_type = other DNA
accatgatcttaggctggcc

SEQ ID NO: 300514 - DNA, 20 bp, synthetic construct
  source 1..20: mol_type = other DNA
aaccatgatcttaggctggc

SEQ ID NO: 300515 - DNA, 20 bp, synthetic construct
  source 1..20: mol_type = other DNA
aaaccatgatcttaggctgg

SEQ ID NO: 300516 - DNA, 20 bp, synthetic construct
  source 1..20: mol_type = other DNA
taaaccatgatcttaggctg

SEQ ID NO: 300517 - DNA, 20 bp, synthetic construct
  source 1..20: mol_type = other DNA
ctaaaccatgatcttaggct

SEQ ID NO: 300518 - DNA, 20 bp, synthetic construct
  source 1..20: mol_type = other DNA
cctaaaccatgatcttaggc

SEQ ID NO: 300519 - DNA, 20 bp, synthetic construct
  source 1..20: mol_type = other DNA
ccctaaaccatgatcttagg

SEQ ID NO: 300520 - DNA, 20 bp, synthetic construct
  source 1..20: mol_type = other DNA
accctaaaccatgatcttag

SEQ ID NO: 300521 - DNA, 20 bp, synthetic construct
  source 1..20: mol_type = other DNA
caccctaaaccatgatctta

SEQ ID NO: 300522 - DNA, 20 bp, synthetic construct
  source 1..20: mol_type = other DNA
tcaccctaaaccatgatctt

SEQ ID NO: 300523 - DNA, 20 bp, synthetic construct
  source 1..20: mol_type = other DNA
atcaccctaaaccatgatct

SEQ ID NO: 300524 - DNA, 20 bp, synthetic construct
  source 1..20: mol_type = other DNA
gatcaccctaaaccatgatc

SEQ ID NO: 300525 - DNA, 20 bp, synthetic construct
  source 1..20: mol_type = other DNA
tgatcaccctaaaccatgat

SEQ ID NO: 300526 - DNA, 20 bp, synthetic construct
  source 1..20: mol_type = other DNA
ctgatcaccctaaaccatga

SEQ ID NO: 300527 - DNA, 20 bp, synthetic construct
  source 1..20: mol_type = other DNA
actgatcaccctaaaccatg

SEQ ID NO: 300528 - DNA, 20 bp, synthetic construct
  source 1..20: mol_type = other DNA
cactgatcaccctaaaccat

SEQ ID NO: 300529 - DNA, 20 bp, synthetic construct
  source 1..20: mol_type = other DNA
gcactgatcaccctaaacca

SEQ ID NO: 300530 - DNA, 20 bp, synthetic construct
  source 1..20: mol_type = other DNA
agcactgatcaccctaaacc

SEQ ID NO: 300531 - DNA, 20 bp, synthetic construct
  source 1..20: mol_type = other DNA
cagcactgatcaccctaaac

SEQ ID NO: 300532 - DNA, 20 bp, synthetic construct
  source 1..20: mol_type = other DNA
ccagcactgatcaccctaaa

SEQ ID NO: 300533 - DNA, 20 bp, synthetic construct
  source 1..20: mol_type = other DNA
gccagcactgatcaccctaa

SEQ ID NO: 300534 - DNA, 20 bp, synthetic construct
  source 1..20: mol_type = other DNA
tgccagcactgatcacccta

SEQ ID NO: 300535 - DNA, 20 bp, synthetic construct
  source 1..20: mol_type = other DNA
ctgccagcactgatcaccct

SEQ ID NO: 300536 - DNA, 20 bp, synthetic construct
  source 1..20: mol_type = other DNA
tctgccagcactgatcaccc

SEQ ID NO: 300537 - DNA, 20 bp, synthetic construct
  source 1..20: mol_type = other DNA
atctgccagcactgatcacc

SEQ ID NO: 300538 - DNA, 20 bp, synthetic construct
  source 1..20: mol_type = other DNA
tatctgccagcactgatcac

SEQ ID NO: 300539 - DNA, 20 bp, synthetic construct
  source 1..20: mol_type = other DNA
ttatctgccagcactgatca

SEQ ID NO: 300540 - DNA, 20 bp, synthetic construct
  source 1..20: mol_type = other DNA
tttatctgccagcactgatc

SEQ ID NO: 300541 - DNA, 20 bp, synthetic construct
  source 1..20: mol_type = other DNA
atttatctgccagcactgat

SEQ ID NO: 300542 - DNA, 20 bp, synthetic construct
  source 1..20: mol_type = other DNA
aatttatctgccagcactga

SEQ ID NO: 300543 - DNA, 20 bp, synthetic construct
  source 1..20: mol_type = other DNA
caatttatctgccagcactg

SEQ ID NO: 300544 - DNA, 20 bp, synthetic construct
  source 1..20: mol_type = other DNA
tcaatttatctgccagcact

SEQ ID NO: 300545 - DNA, 20 bp, synthetic construct
  source 1..20: mol_type = other DNA
ttcaatttatctgccagcac

SEQ ID NO: 300546 - DNA, 20 bp, synthetic construct
  source 1..20: mol_type = other DNA
tttcaatttatctgccagca

SEQ ID NO: 300547 - DNA, 20 bp, synthetic construct
  source 1..20: mol_type = other DNA
ttttcaatttatctgccagc

SEQ ID NO: 300548 - DNA, 20 bp, synthetic construct
  source 1..20: mol_type = other DNA
cttttcaatttatctgccag

SEQ ID NO: 300549 - DNA, 20 bp, synthetic construct
  source 1..20: mol_type = other DNA
ccttttcaatttatctgcca

SEQ ID NO: 300550 - DNA, 20 bp, synthetic construct
  source 1..20: mol_type = other DNA
gccttttcaatttatctgcc

SEQ ID NO: 300551 - DNA, 20 bp, synthetic construct
  source 1..20: mol_type = other DNA
tgccttttcaatttatctgc

SEQ ID NO: 300552 - DNA, 20 bp, synthetic construct
  source 1..20: mol_type = other DNA
gtgccttttcaatttatctg

SEQ ID NO: 300553 - DNA, 20 bp, synthetic construct
  source 1..20: mol_type = other DNA
cgtgccttttcaatttatct

SEQ ID NO: 300554 - DNA, 20 bp, synthetic construct
  source 1..20: mol_type = other DNA
gcgtgccttttcaatttatc

SEQ ID NO: 300555 - DNA, 20 bp, synthetic construct
  source 1..20: mol_type = other DNA
agcgtgccttttcaatttat

SEQ ID NO: 300556 - DNA, 20 bp, synthetic construct
  source 1..20: mol_type = other DNA
cagcgtgccttttcaattta

SEQ ID NO: 300557 - DNA, 20 bp, synthetic construct
  source 1..20: mol_type = other DNA
ccagcgtgccttttcaattt

SEQ ID NO: 300558 - DNA, 20 bp, synthetic construct
  source 1..20: mol_type = other DNA
gccagcgtgccttttcaatt

SEQ ID NO: 300559 - DNA, 20 bp, synthetic construct
  source 1..20: mol_type = other DNA
agccagcgtgccttttcaat

SEQ ID NO: 300560 - DNA, 20 bp, synthetic construct
  source 1..20: mol_type = other DNA
aagccagcgtgccttttcaa

SEQ ID NO: 300561 - DNA, 20 bp, synthetic construct
  source 1..20: mol_type = other DNA
caagccagcgtgccttttca

SEQ ID NO: 300562 - DNA, 20 bp, synthetic construct
  source 1..20: mol_type = other DNA
acaagccagcgtgccttttc

SEQ ID NO: 300563 - DNA, 20 bp, synthetic construct
  source 1..20: mol_type = other DNA
cacaagccagcgtgcctttt

SEQ ID NO: 300564 - DNA, 20 bp, synthetic construct
  source 1..20: mol_type = other DNA
tcacaagccagcgtgccttt

SEQ ID NO: 300565 - DNA, 20 bp, synthetic construct
  source 1..20: mol_type = other DNA
atcacaagccagcgtgcctt

SEQ ID NO: 300566 - DNA, 20 bp, synthetic construct
  source 1..20: mol_type = other DNA
gatcacaagccagcgtgcct

SEQ ID NO: 300567 - DNA, 20 bp, synthetic construct
  source 1..20: mol_type = other DNA
agatcacaagccagcgtgcc

SEQ ID NO: 300568 - DNA, 20 bp, synthetic construct
  source 1..20: mol_type = other DNA
aagatcacaagccagcgtgc

SEQ ID NO: 300569 - DNA, 20 bp, synthetic construct
  source 1..20: mol_type = other DNA
taagatcacaagccagcgtg

SEQ ID NO: 300570 - DNA, 20 bp, synthetic construct
  source 1..20: mol_type = other DNA
ttaagatcacaagccagcgt

SEQ ID NO: 300571 - DNA, 20 bp, synthetic construct
  source 1..20: mol_type = other DNA
tttaagatcacaagccagcg

SEQ ID NO: 300572 - DNA, 20 bp, synthetic construct
  source 1..20: mol_type = other DNA
atttaagatcacaagccagc

SEQ ID NO: 300573 - DNA, 20 bp, synthetic construct
  source 1..20: mol_type = other DNA
catttaagatcacaagccag

SEQ ID NO: 300574 - DNA, 20 bp, synthetic construct
  source 1..20: mol_type = other DNA
tcatttaagatcacaagcca

SEQ ID NO: 300575 - DNA, 20 bp, synthetic construct
  source 1..20: mol_type = other DNA
ctcatttaagatcacaagcc

SEQ ID NO: 300576 - DNA, 20 bp, synthetic construct
  source 1..20: mol_type = other DNA
cctcatttaagatcacaagc

SEQ ID NO: 300577 - DNA, 20 bp, synthetic construct
  source 1..20: mol_type = other DNA
tcctcatttaagatcacaag

SEQ ID NO: 300578 - DNA, 20 bp, synthetic construct
  source 1..20: mol_type = other DNA
gtcctcatttaagatcacaa

SEQ ID NO: 300579 - DNA, 20 bp, synthetic construct
  source 1..20: mol_type = other DNA
tgtcctcatttaagatcaca

SEQ ID NO: 300580 - DNA, 20 bp, synthetic construct
  source 1..20: mol_type = other DNA
ttgtcctcatttaagatcac

SEQ ID NO: 300581 - DNA, 20 bp, synthetic construct
  source 1..20: mol_type = other DNA
attgtcctcatttaagatca

SEQ ID NO: 300582 - DNA, 20 bp, synthetic construct
  source 1..20: mol_type = other DNA
gattgtcctcatttaagatc

SEQ ID NO: 300583 - DNA, 20 bp, synthetic construct
  source 1..20: mol_type = other DNA
ggattgtcctcatttaagat

SEQ ID NO: 300584 - DNA, 20 bp, synthetic construct
  source 1..20: mol_type = other DNA
gggattgtcctcatttaaga

SEQ ID NO: 300585 - DNA, 20 bp, synthetic construct
  source 1..20: mol_type = other DNA
ggggattgtcctcatttaag

SEQ ID NO: 300586 - DNA, 20 bp, synthetic construct
  source 1..20: mol_type = other DNA
gggggattgtcctcatttaa

SEQ ID NO: 300587 - DNA, 20 bp, synthetic construct
  source 1..20: mol_type = other DNA
ggggggattgtcctcattta

SEQ ID NO: 300588 - DNA, 20 bp, synthetic construct
  source 1..20: mol_type = other DNA
tggggggattgtcctcattt

SEQ ID NO: 300589 - DNA, 20 bp, synthetic construct
  source 1..20: mol_type = other DNA
ctggggggattgtcctcatt

SEQ ID NO: 300590 - DNA, 20 bp, synthetic construct
  source 1..20: mol_type = other DNA
cctggggggattgtcctcat

SEQ ID NO: 300591 - DNA, 20 bp, synthetic construct
  source 1..20: mol_type = other DNA
ccctggggggattgtcctca

SEQ ID NO: 300592 - DNA, 20 bp, synthetic construct
  source 1..20: mol_type = other DNA
gccctggggggattgtcctc

SEQ ID NO: 300593 - DNA, 20 bp, synthetic construct
  source 1..20: mol_type = other DNA
agccctggggggattgtcct

SEQ ID NO: 300594 - DNA, 20 bp, synthetic construct
  source 1..20: mol_type = other DNA
cagccctggggggattgtcc

SEQ ID NO: 300595 - DNA, 20 bp, synthetic construct
  source 1..20: mol_type = other DNA
ccagccctggggggattgtc

SEQ ID NO: 300596 - DNA, 20 bp, synthetic construct
  source 1..20: mol_type = other DNA
cccagccctggggggattgt

SEQ ID NO: 300597 - DNA, 20 bp, synthetic construct
  source 1..20: mol_type = other DNA
gcccagccctggggggattg

SEQ ID NO: 300598 - DNA, 20 bp, synthetic construct
  source 1..20: mol_type = other DNA
tgcccagccctggggggatt

SEQ ID NO: 300599 - DNA, 20 bp, synthetic construct
  source 1..20: mol_type = other DNA
gtgcccagccctggggggat

SEQ ID NO: 300600 - DNA, 20 bp, synthetic construct
  source 1..20: mol_type = other DNA
agtgcccagccctgggggga

SEQ ID NO: 300601 - DNA, 20 bp, synthetic construct
  source 1..20: mol_type = other DNA
gagtgcccagccctgggggg

SEQ ID NO: 300602 - DNA, 20 bp, synthetic construct
  source 1..20: mol_type = other DNA
ggagtgcccagccctggggg

SEQ ID NO: 300603 - DNA, 20 bp, synthetic construct
  source 1..20: mol_type = other DNA
aggagtgcccagccctgggg

SEQ ID NO: 300604 - DNA, 20 bp, synthetic construct
  source 1..20: mol_type = other DNA
gaggagtgcccagccctggg

SEQ ID NO: 300605 - DNA, 20 bp, synthetic construct
  source 1..20: mol_type = other DNA
ggaggagtgcccagccctgg

SEQ ID NO: 300606 - DNA, 20 bp, synthetic construct
  source 1..20: mol_type = other DNA
gggaggagtgcccagccctg

SEQ ID NO: 300607 - DNA, 20 bp, synthetic construct
  source 1..20: mol_type = other DNA
ggggaggagtgcccagccct

SEQ ID NO: 300608 - DNA, 20 bp, synthetic construct
  source 1..20: mol_type = other DNA
aggggaggagtgcccagccc

SEQ ID NO: 300609 - DNA, 20 bp, synthetic construct
  source 1..20: mol_type = other DNA
gaggggaggagtgcccagcc

SEQ ID NO: 300610 - DNA, 20 bp, synthetic construct
  source 1..20: mol_type = other DNA
ggaggggaggagtgcccagc

SEQ ID NO: 300611 - DNA, 20 bp, synthetic construct
  source 1..20: mol_type = other DNA
gggaggggaggagtgcccag

SEQ ID NO: 300612 - DNA, 20 bp, synthetic construct
  source 1..20: mol_type = other DNA
ggggaggggaggagtgccca

SEQ ID NO: 300613 - DNA, 20 bp, synthetic construct
  source 1..20: mol_type = other DNA
aggggaggggaggagtgccc

SEQ ID NO: 300614 - DNA, 20 bp, synthetic construct
  source 1..20: mol_type = other DNA
gaggggaggggaggagtgcc

SEQ ID NO: 300615 - DNA, 20 bp, synthetic construct
  source 1..20: mol_type = other DNA
tgaggggaggggaggagtgc

SEQ ID NO: 300616 - DNA, 20 bp, synthetic construct
  source 1..20: mol_type = other DNA
gtgaggggaggggaggagtg

SEQ ID NO: 300617 - DNA, 20 bp, synthetic construct
  source 1..20: mol_type = other DNA
agtgaggggaggggaggagt

SEQ ID NO: 300618 - DNA, 20 bp, synthetic construct
  source 1..20: mol_type = other DNA
aagtgaggggaggggaggag

SEQ ID NO: 300619 - DNA, 20 bp, synthetic construct
  source 1..20: mol_type = other DNA
gaagtgaggggaggggagga

SEQ ID NO: 300620 - DNA, 20 bp, synthetic construct
  source 1..20: mol_type = other DNA
agaagtgaggggaggggagg

SEQ ID NO: 300621 - DNA, 20 bp, synthetic construct
  source 1..20: mol_type = other DNA
gagaagtgaggggaggggag

SEQ ID NO: 300622 - DNA, 20 bp, synthetic construct
  source 1..20: mol_type = other DNA
ggagaagtgaggggagggga

SEQ ID NO: 300623 - DNA, 20 bp, synthetic construct
  source 1..20: mol_type = other DNA
gggagaagtgaggggagggg

SEQ ID NO: 300624 - DNA, 20 bp, synthetic construct
  source 1..20: mol_type = other DNA
tgggagaagtgaggggaggg

SEQ ID NO: 300625 - DNA, 20 bp, synthetic construct
  source 1..20: mol_type = other DNA
gtgggagaagtgaggggagg

SEQ ID NO: 300626 - DNA, 20 bp, synthetic construct
  source 1..20: mol_type = other DNA
ggtgggagaagtgaggggag

SEQ ID NO: 300627 - DNA, 20 bp, synthetic construct
  source 1..20: mol_type = other DNA
aggtgggagaagtgagggga

SEQ ID NO: 300628 - DNA, 20 bp, synthetic construct
  source 1..20: mol_type = other DNA
caggtgggagaagtgagggg

SEQ ID NO: 300629 - DNA, 20 bp, synthetic construct
  source 1..20: mol_type = other DNA
gcaggtgggagaagtgaggg

SEQ ID NO: 300630 - DNA, 20 bp, synthetic construct
  source 1..20: mol_type = other DNA
tgcaggtgggagaagtgagg

SEQ ID NO: 300631 - DNA, 20 bp, synthetic construct
  source 1..20: mol_type = other DNA
ctgcaggtgggagaagtgag

SEQ ID NO: 300632 - DNA, 20 bp, synthetic construct
  source 1..20: mol_type = other DNA
tctgcaggtgggagaagtga

SEQ ID NO: 300633 - DNA, 20 bp, synthetic construct
  source 1..20: mol_type = other DNA
ctctgcaggtgggagaagtg

SEQ ID NO: 300634 - DNA, 20 bp, synthetic construct
  source 1..20: mol_type = other DNA
gctctgcaggtgggagaagt

SEQ ID NO: 300635 - DNA, 20 bp, synthetic construct
  source 1..20: mol_type = other DNA
ggctctgcaggtgggagaag

SEQ ID NO: 300636 - DNA, 20 bp, synthetic construct
  source 1..20: mol_type = other DNA
tggctctgcaggtgggagaa

SEQ ID NO: 300637 - DNA, 20 bp, synthetic construct
  source 1..20: mol_type = other DNA
ctggctctgcaggtgggaga

SEQ ID NO: 300638 - DNA, 20 bp, synthetic construct
  source 1..20: mol_type = other DNA
actggctctgcaggtgggag

SEQ ID NO: 300639 - DNA, 20 bp, synthetic construct
  source 1..20: mol_type = other DNA
cactggctctgcaggtggga

SEQ ID NO: 300640 - DNA, 20 bp, synthetic construct
  source 1..20: mol_type = other DNA
acactggctctgcaggtggg

SEQ ID NO: 300641 - DNA, 20 bp, synthetic construct
  source 1..20: mol_type = other DNA
gacactggctctgcaggtgg

SEQ ID NO: 300642 - DNA, 20 bp, synthetic construct
  source 1..20: mol_type = other DNA
ggacactggctctgcaggtg

SEQ ID NO: 300643 - DNA, 20 bp, synthetic construct
  source 1..20: mol_type = other DNA
aggacactggctctgcaggt

SEQ ID NO: 300644 - DNA, 20 bp, synthetic construct
  source 1..20: mol_type = other DNA
aaggacactggctctgcagg

SEQ ID NO: 300645 - DNA, 20 bp, synthetic construct
  source 1..20: mol_type = other DNA
caaggacactggctctgcag

SEQ ID NO: 300646 - DNA, 20 bp, synthetic construct
  source 1..20: mol_type = other DNA
ccaaggacactggctctgca

SEQ ID NO: 300647 - DNA, 20 bp, synthetic construct
  source 1..20: mol_type = other DNA
cccaaggacactggctctgc

SEQ ID NO: 300648 - DNA, 20 bp, synthetic construct
  source 1..20: mol_type = other DNA
acccaaggacactggctctg

SEQ ID NO: 300649 - DNA, 20 bp, synthetic construct
  source 1..20: mol_type = other DNA
cacccaaggacactggctct

SEQ ID NO: 300650 - DNA, 20 bp, synthetic construct
  source 1..20: mol_type = other DNA
ccacccaaggacactggctc

SEQ ID NO: 300651 - DNA, 20 bp, synthetic construct
  source 1..20: mol_type = other DNA
cccacccaaggacactggct

SEQ ID NO: 300652 - DNA, 20 bp, synthetic construct
  source 1..20: mol_type = other DNA
gcccacccaaggacactggc

SEQ ID NO: 300653 - DNA, 20 bp, synthetic construct
  source 1..20: mol_type = other DNA
agcccacccaaggacactgg

SEQ ID NO: 300654 - DNA, 20 bp, synthetic construct
  source 1..20: mol_type = other DNA
tagcccacccaaggacactg

SEQ ID NO: 300655 - DNA, 20 bp, synthetic construct
  source 1..20: mol_type = other DNA
ctagcccacccaaggacact

SEQ ID NO: 300656 - DNA, 20 bp, synthetic construct
  source 1..20: mol_type = other DNA
tctagcccacccaaggacac

SEQ ID NO: 300657 - DNA, 20 bp, synthetic construct
  source 1..20: mol_type = other DNA
atctagcccacccaaggaca

SEQ ID NO: 300658 - DNA, 20 bp, synthetic construct
  source 1..20: mol_type = other DNA
tatctagcccacccaaggac

SEQ ID NO: 300659 - DNA, 20 bp, synthetic construct
  source 1..20: mol_type = other DNA
ctatctagcccacccaagga

SEQ ID NO: 300660 - DNA, 20 bp, synthetic construct
  source 1..20: mol_type = other DNA
cctatctagcccacccaagg

SEQ ID NO: 300661 - DNA, 20 bp, synthetic construct
  source 1..20: mol_type = other DNA
tcctatctagcccacccaag

SEQ ID NO: 300662 - DNA, 20 bp, synthetic construct
  source 1..20: mol_type = other DNA
atcctatctagcccacccaa

SEQ ID NO: 300663 - DNA, 20 bp, synthetic construct
  source 1..20: mol_type = other DNA
tatcctatctagcccaccca

SEQ ID NO: 300664 - DNA, 20 bp, synthetic construct
  source 1..20: mol_type = other DNA
atatcctatctagcccaccc

SEQ ID NO: 300665 - DNA, 20 bp, synthetic construct
  source 1..20: mol_type = other DNA
tatatcctatctagcccacc

SEQ ID NO: 300666 - DNA, 20 bp, synthetic construct
  source 1..20: mol_type = other DNA
gtatatcctatctagcccac

SEQ ID NO: 300667 - DNA, 20 bp, synthetic construct
  source 1..20: mol_type = other DNA
agtatatcctatctagccca

SEQ ID NO: 300668 - DNA, 20 bp, synthetic construct
  source 1..20: mol_type = other DNA
cagtatatcctatctagccc

SEQ ID NO: 300669 - DNA, 20 bp, synthetic construct
  source 1..20: mol_type = other DNA
acagtatatcctatctagcc

SEQ ID NO: 300670 - DNA, 20 bp, synthetic construct
  source 1..20: mol_type = other DNA
tacagtatatcctatctagc

SEQ ID NO: 300671 - DNA, 20 bp, synthetic construct
  source 1..20: mol_type = other DNA
atacagtatatcctatctag

SEQ ID NO: 300672 - DNA, 20 bp, synthetic construct
  source 1..20: mol_type = other DNA
catacagtatatcctatcta

SEQ ID NO: 300673 - DNA, 20 bp, synthetic construct
  source 1..20: mol_type = other DNA
gcatacagtatatcctatct

SEQ ID NO: 300674 - DNA, 20 bp, synthetic construct
  source 1..20: mol_type = other DNA
ggcatacagtatatcctatc

SEQ ID NO: 300675 - DNA, 20 bp, synthetic construct
  source 1..20: mol_type = other DNA
cggcatacagtatatcctat

SEQ ID NO: 300676 - DNA, 20 bp, synthetic construct
  source 1..20: mol_type = other DNA
ccggcatacagtatatccta

SEQ ID NO: 300677 - DNA, 20 bp, synthetic construct
  source 1..20: mol_type = other DNA
gccggcatacagtatatcct

SEQ ID NO: 300678 - DNA, 20 bp, synthetic construct
  source 1..20: mol_type = other DNA
agccggcatacagtatatcc

SEQ ID NO: 300679 - DNA, 20 bp, synthetic construct
  source 1..20: mol_type = other DNA
gagccggcatacagtatatc

SEQ ID NO: 300680 - DNA, 20 bp, synthetic construct
  source 1..20: mol_type = other DNA
ggagccggcatacagtatat

SEQ ID NO: 300681 - DNA, 20 bp, synthetic construct
  source 1..20: mol_type = other DNA
aggagccggcatacagtata

SEQ ID NO: 300682 - DNA, 20 bp, synthetic construct
  source 1..20: mol_type = other DNA
aaggagccggcatacagtat

SEQ ID NO: 300683 - DNA, 20 bp, synthetic construct
  source 1..20: mol_type = other DNA
gaaggagccggcatacagta

SEQ ID NO: 300684 - DNA, 20 bp, synthetic construct
  source 1..20: mol_type = other DNA
tgaaggagccggcatacagt

SEQ ID NO: 300685 - DNA, 20 bp, synthetic construct
  source 1..20: mol_type = other DNA
ttgaaggagccggcatacag

SEQ ID NO: 300686 - DNA, 20 bp, synthetic construct
  source 1..20: mol_type = other DNA
cttgaaggagccggcataca

SEQ ID NO: 300687 - DNA, 20 bp, synthetic construct
  source 1..20: mol_type = other DNA
gcttgaaggagccggcatac

SEQ ID NO: 300688 - DNA, 20 bp, synthetic construct
  source 1..20: mol_type = other DNA
agcttgaaggagccggcata

SEQ ID NO: 300689 - DNA, 20 bp, synthetic construct
  source 1..20: mol_type = other DNA
cagcttgaaggagccggcat

SEQ ID NO: 300690 - DNA, 20 bp, synthetic construct
  source 1..20: mol_type = other DNA
gcagcttgaaggagccggca

SEQ ID NO: 300691 - DNA, 20 bp, synthetic construct
  source 1..20: mol_type = other DNA
agcagcttgaaggagccggc

SEQ ID NO: 300692 - DNA, 20 bp, synthetic construct
  source 1..20: mol_type = other DNA
cagcagcttgaaggagccgg

SEQ ID NO: 300693 - DNA, 20 bp, synthetic construct
  source 1..20: mol_type = other DNA
tcagcagcttgaaggagccg

SEQ ID NO: 300694 - DNA, 20 bp, synthetic construct
  source 1..20: mol_type = other DNA
gtcagcagcttgaaggagcc

SEQ ID NO: 300695 - DNA, 20 bp, synthetic construct
  source 1..20: mol_type = other DNA
agtcagcagcttgaaggagc

SEQ ID NO: 300696 - DNA, 20 bp, synthetic construct
  source 1..20: mol_type = other DNA
gagtcagcagcttgaaggag

SEQ ID NO: 300697 - DNA, 20 bp, synthetic construct
  source 1..20: mol_type = other DNA
tgagtcagcagcttgaagga

SEQ ID NO: 300698 - DNA, 20 bp, synthetic construct
  source 1..20: mol_type = other DNA
gtgagtcagcagcttgaagg

SEQ ID NO: 300699 - DNA, 20 bp, synthetic construct
  source 1..20: mol_type = other DNA
agtgagtcagcagcttgaag

SEQ ID NO: 300700 - DNA, 20 bp, synthetic construct
  source 1..20: mol_type = other DNA
aagtgagtcagcagcttgaa

SEQ ID NO: 300701 - DNA, 20 bp, synthetic construct
  source 1..20: mol_type = other DNA
aaagtgagtcagcagcttga

SEQ ID NO: 300702 - DNA, 20 bp, synthetic construct
  source 1..20: mol_type = other DNA
taaagtgagtcagcagcttg

SEQ ID NO: 300703 - DNA, 20 bp, synthetic construct
  source 1..20: mol_type = other DNA
ataaagtgagtcagcagctt

SEQ ID NO: 300704 - DNA, 20 bp, synthetic construct
  source 1..20: mol_type = other DNA
gataaagtgagtcagcagct

SEQ ID NO: 300705 - DNA, 20 bp, synthetic construct
  source 1..20: mol_type = other DNA
tgataaagtgagtcagcagc

SEQ ID NO: 300706 - DNA, 20 bp, synthetic construct
  source 1..20: mol_type = other DNA
ttgataaagtgagtcagcag

SEQ ID NO: 300707 - DNA, 20 bp, synthetic construct
  source 1..20: mol_type = other DNA
attgataaagtgagtcagca

SEQ ID NO: 300708 - DNA, 20 bp, synthetic construct
  source 1..20: mol_type = other DNA
tattgataaagtgagtcagc

SEQ ID NO: 300709 - DNA, 20 bp, synthetic construct
  source 1..20: mol_type = other DNA
ctattgataaagtgagtcag

SEQ ID NO: 300710 - DNA, 20 bp, synthetic construct
  source 1..20: mol_type = other DNA
actattgataaagtgagtca

SEQ ID NO: 300711 - DNA, 20 bp, synthetic construct
  source 1..20: mol_type = other DNA
aactattgataaagtgagtc

SEQ ID NO: 300712 - DNA, 20 bp, synthetic construct
  source 1..20: mol_type = other DNA
gaactattgataaagtgagt

SEQ ID NO: 300713 - DNA, 20 bp, synthetic construct
  source 1..20: mol_type = other DNA
ggaactattgataaagtgag

SEQ ID NO: 300714 - DNA, 20 bp, synthetic construct
  source 1..20: mol_type = other DNA
tggaactattgataaagtga

SEQ ID NO: 300715 - DNA, 20 bp, synthetic construct
  source 1..20: mol_type = other DNA
atggaactattgataaagtg

SEQ ID NO: 300716 - DNA, 20 bp, synthetic construct
  source 1..20: mol_type = other DNA
aatggaactattgataaagt

SEQ ID NO: 300717 - DNA, 20 bp, synthetic construct
  source 1..20: mol_type = other DNA
aaatggaactattgataaag

SEQ ID NO: 300718 - DNA, 20 bp, synthetic construct
  source 1..20: mol_type = other DNA
taaatggaactattgataaa

SEQ ID NO: 300719 - DNA, 20 bp, synthetic construct
  source 1..20: mol_type = other DNA
ttaaatggaactattgataa

SEQ ID NO: 300720 - DNA, 20 bp, synthetic construct
  source 1..20: mol_type = other DNA
tttaaatggaactattgata

SEQ ID NO: 300721 - DNA, 20 bp, synthetic construct
  source 1..20: mol_type = other DNA
atttaaatggaactattgat

SEQ ID NO: 300722 - DNA, 20 bp, synthetic construct
  source 1..20: mol_type = other DNA
aatttaaatggaactattga

SEQ ID NO: 300723 - DNA, 20 bp, synthetic construct
  source 1..20: mol_type = other DNA
caatttaaatggaactattg

SEQ ID NO: 300724 - DNA, 20 bp, synthetic construct
  source 1..20: mol_type = other DNA
tcaatttaaatggaactatt

SEQ ID NO: 300725 - DNA, 20 bp, synthetic construct
  source 1..20: mol_type = other DNA
gtcaatttaaatggaactat

SEQ ID NO: 300726 - DNA, 20 bp, synthetic construct
  source 1..20: mol_type = other DNA
agtcaatttaaatggaacta

SEQ ID NO: 300727 - DNA, 20 bp, synthetic construct
  source 1..20: mol_type = other DNA
aagtcaatttaaatggaact

SEQ ID NO: 300728 - DNA, 20 bp, synthetic construct
  source 1..20: mol_type = other DNA
gaagtcaatttaaatggaac

SEQ ID NO: 300729 - DNA, 20 bp, synthetic construct
  source 1..20: mol_type = other DNA
tgaagtcaatttaaatggaa

SEQ ID NO: 300730 - DNA, 20 bp, synthetic construct
  source 1..20: mol_type = other DNA
ctgaagtcaatttaaatgga

SEQ ID NO: 300731 - DNA, 20 bp, synthetic construct
  source 1..20: mol_type = other DNA
actgaagtcaatttaaatgg

SEQ ID NO: 300732 - DNA, 20 bp, synthetic construct
  source 1..20: mol_type = other DNA
cactgaagtcaatttaaatg

SEQ ID NO: 300733 - DNA, 20 bp, synthetic construct
  source 1..20: mol_type = other DNA
ccactgaagtcaatttaaat

SEQ ID NO: 300734 - DNA, 20 bp, synthetic construct
  source 1..20: mol_type = other DNA
accactgaagtcaatttaaa

SEQ ID NO: 300735 - DNA, 20 bp, synthetic construct
  source 1..20: mol_type = other DNA
caccactgaagtcaatttaa

SEQ ID NO: 300736 - DNA, 20 bp, synthetic construct
  source 1..20: mol_type = other DNA
tcaccactgaagtcaattta

SEQ ID NO: 300737 - DNA, 20 bp, synthetic construct
  source 1..20: mol_type = other DNA
ctcaccactgaagtcaattt

SEQ ID NO: 300738 - DNA, 20 bp, synthetic construct
  source 1..20: mol_type = other DNA
tctcaccactgaagtcaatt

SEQ ID NO: 300739 - DNA, 20 bp, synthetic construct
  source 1..20: mol_type = other DNA
gtctcaccactgaagtcaat

SEQ ID NO: 300740 - DNA, 20 bp, synthetic construct
  source 1..20: mol_type = other DNA
agtctcaccactgaagtcaa

SEQ ID NO: 300741 - DNA, 20 bp, synthetic construct
  source 1..20: mol_type = other DNA
cagtctcaccactgaagtca

SEQ ID NO: 300742 - DNA, 20 bp, synthetic construct
  source 1..20: mol_type = other DNA
acagtctcaccactgaagtc

SEQ ID NO: 300743 - DNA, 20 bp, synthetic construct
  source 1..20: mol_type = other DNA
tacagtctcaccactgaagt

SEQ ID NO: 300744 - DNA, 20 bp, synthetic construct
  source 1..20: mol_type = other DNA
atacagtctcaccactgaag

SEQ ID NO: 300745 - DNA, 20 bp, synthetic construct
  source 1..20: mol_type = other DNA
gatacagtctcaccactgaa

SEQ ID NO: 300746 - DNA, 20 bp, synthetic construct
  source 1..20: mol_type = other DNA
ggatacagtctcaccactga

SEQ ID NO: 300747 - DNA, 20 bp, synthetic construct
  source 1..20: mol_type = other DNA
aggatacagtctcaccactg

SEQ ID NO: 300748 - DNA, 20 bp, synthetic construct
  source 1..20: mol_type = other DNA
caggatacagtctcaccact

SEQ ID NO: 300749 - DNA, 20 bp, synthetic construct
  source 1..20: mol_type = other DNA
acaggatacagtctcaccac

SEQ ID NO: 300750 - DNA, 20 bp, synthetic construct
  source 1..20: mol_type = other DNA
aacaggatacagtctcacca

SEQ ID NO: 300751 - DNA, 20 bp, synthetic construct
  source 1..20: mol_type = other DNA
aaacaggatacagtctcacc

SEQ ID NO: 300752 - DNA, 20 bp, synthetic construct
  source 1..20: mol_type = other DNA
caaacaggatacagtctcac

SEQ ID NO: 300753 - DNA, 20 bp, synthetic construct
  source 1..20: mol_type = other DNA
gcaaacaggatacagtctca

SEQ ID NO: 300754 - DNA, 20 bp, synthetic construct
  source 1..20: mol_type = other DNA
agcaaacaggatacagtctc

SEQ ID NO: 300755 - DNA, 20 bp, synthetic construct
  source 1..20: mol_type = other DNA
tagcaaacaggatacagtct

SEQ ID NO: 300756 - DNA, 20 bp, synthetic construct
  source 1..20: mol_type = other DNA
atagcaaacaggatacagtc

SEQ ID NO: 300757 - DNA, 20 bp, synthetic construct
  source 1..20: mol_type = other DNA
aatagcaaacaggatacagt

SEQ ID NO: 300758 - DNA, 20 bp, synthetic construct
  source 1..20: mol_type = other DNA
caatagcaaacaggatacag

SEQ ID NO: 300759 - DNA, 20 bp, synthetic construct
  source 1..20: mol_type = other DNA
gcaatagcaaacaggataca

SEQ ID NO: 300760 - DNA, 20 bp, synthetic construct
  source 1..20: mol_type = other DNA
agcaatagcaaacaggatac

SEQ ID NO: 300761 - DNA, 20 bp, synthetic construct
  source 1..20: mol_type = other DNA
aagcaatagcaaacaggata

SEQ ID NO: 300762 - DNA, 20 bp, synthetic construct
  source 1..20: mol_type = other DNA
caagcaatagcaaacaggat

SEQ ID NO: 300763 - DNA, 20 bp, synthetic construct
  source 1..20: mol_type = other DNA
acaagcaatagcaaacagga

SEQ ID NO: 300764 - DNA, 20 bp, synthetic construct
  source 1..20: mol_type = other DNA
aacaagcaatagcaaacagg

SEQ ID NO: 300765 - DNA, 20 bp, synthetic construct
  source 1..20: mol_type = other DNA
caacaagcaatagcaaacag

SEQ ID NO: 300766 - DNA, 20 bp, synthetic construct
  source 1..20: mol_type = other DNA
acaacaagcaatagcaaaca

SEQ ID NO: 300767 - DNA, 20 bp, synthetic construct
  source 1..20: mol_type = other DNA
cacaacaagcaatagcaaac

SEQ ID NO: 300768 - DNA, 20 bp, synthetic construct
  source 1..20: mol_type = other DNA
gcacaacaagcaatagcaaa

SEQ ID NO: 300769 - DNA, 20 bp, synthetic construct
  source 1..20: mol_type = other DNA
agcacaacaagcaatagcaa

SEQ ID NO: 300770 - DNA, 20 bp, synthetic construct
  source 1..20: mol_type = other DNA
tagcacaacaagcaatagca

SEQ ID NO: 300771 - DNA, 20 bp, synthetic construct
  source 1..20: mol_type = other DNA
atagcacaacaagcaatagc

SEQ ID NO: 300772 - DNA, 20 bp, synthetic construct
  source 1..20: mol_type = other DNA
catagcacaacaagcaatag

SEQ ID NO: 300773 - DNA, 20 bp, synthetic construct
  source 1..20: mol_type = other DNA
ccatagcacaacaagcaata

SEQ ID NO: 300774 - DNA, 20 bp, synthetic construct
  source 1..20: mol_type = other DNA
cccatagcacaacaagcaat

SEQ ID NO: 300775 - DNA, 20 bp, synthetic construct
  source 1..20: mol_type = other DNA
ccccatagcacaacaagcaa

SEQ ID NO: 300776 - DNA, 20 bp, synthetic construct
  source 1..20: mol_type = other DNA
cccccatagcacaacaagca

SEQ ID NO: 300777 - DNA, 20 bp, synthetic construct
  source 1..20: mol_type = other DNA
ccccccatagcacaacaagc

SEQ ID NO: 300778 - DNA, 20 bp, synthetic construct
  source 1..20: mol_type = other DNA
tccccccatagcacaacaag

SEQ ID NO: 300779 - DNA, 20 bp, synthetic construct
  source 1..20: mol_type = other DNA
ctccccccatagcacaacaa

SEQ ID NO: 300780 - DNA, 20 bp, synthetic construct
  source 1..20: mol_type = other DNA
cctccccccatagcacaaca

SEQ ID NO: 300781 - DNA, 20 bp, synthetic construct
  source 1..20: mol_type = other DNA
ccctccccccatagcacaac

SEQ ID NO: 300782 - DNA, 20 bp, synthetic construct
  source 1..20: mol_type = other DNA
cccctccccccatagcacaa

SEQ ID NO: 300783 - DNA, 20 bp, synthetic construct
  source 1..20: mol_type = other DNA
ccccctccccccatagcaca

SEQ ID NO: 300784 - DNA, 20 bp, synthetic construct
  source 1..20: mol_type = other DNA
cccccctccccccatagcac

SEQ ID NO: 300785 - DNA, 20 bp, synthetic construct
  source 1..20: mol_type = other DNA
tcccccctccccccatagca

SEQ ID NO: 300786 - DNA, 20 bp, synthetic construct
  source 1..20: mol_type = other DNA
ctcccccctccccccatagc

SEQ ID NO: 300787 - DNA, 20 bp, synthetic construct
  source 1..20: mol_type = other DNA
cctcccccctccccccatag

SEQ ID NO: 300788 - DNA, 20 bp, synthetic construct
  source 1..20: mol_type = other DNA
tcctcccccctccccccata

SEQ ID NO: 300789 - DNA, 20 bp, synthetic construct
  source 1..20: mol_type = other DNA
ttcctcccccctccccccat

SEQ ID NO: 300790 - DNA, 20 bp, synthetic construct
  source 1..20: mol_type = other DNA
attcctcccccctcccccca

SEQ ID NO: 300791 - DNA, 20 bp, synthetic construct
  source 1..20: mol_type = other DNA
cattcctcccccctcccccc

SEQ ID NO: 300792 - DNA, 20 bp, synthetic construct
  source 1..20: mol_type = other DNA
acattcctcccccctccccc

SEQ ID NO: 300793 - DNA, 20 bp, synthetic construct
  source 1..20: mol_type = other DNA
cacattcctcccccctcccc

SEQ ID NO: 300794 - DNA, 20 bp, synthetic construct
  source 1..20: mol_type = other DNA
acacattcctcccccctccc

SEQ ID NO: 300795 - DNA, 20 bp, synthetic construct
  source 1..20: mol_type = other DNA
tacacattcctcccccctcc

SEQ ID NO: 300796 - DNA, 20 bp, synthetic construct
  source 1..20: mol_type = other DNA
ttacacattcctcccccctc

SEQ ID NO: 300797 - DNA, 20 bp, synthetic construct
  source 1..20: mol_type = other DNA
cttacacattcctcccccct

SEQ ID NO: 300798 - DNA, 20 bp, synthetic construct
  source 1..20: mol_type = other DNA
tcttacacattcctcccccc

SEQ ID NO: 300799 - DNA, 20 bp, synthetic construct
  source 1..20: mol_type = other DNA
atcttacacattcctccccc

SEQ ID NO: 300800 - DNA, 20 bp, synthetic construct
  source 1..20: mol_type = other DNA
tatcttacacattcctcccc

SEQ ID NO: 300801 - DNA, 20 bp, synthetic construct
  source 1..20: mol_type = other DNA
ctatcttacacattcctccc

SEQ ID NO: 300802 - DNA, 20 bp, synthetic construct
  source 1..20: mol_type = other DNA
actatcttacacattcctcc

SEQ ID NO: 300803 - DNA, 20 bp, synthetic construct
  source 1..20: mol_type = other DNA
aactatcttacacattcctc

SEQ ID NO: 300804 - DNA, 20 bp, synthetic construct
  source 1..20: mol_type = other DNA
taactatcttacacattcct

SEQ ID NO: 300805 - DNA, 20 bp, synthetic construct
  source 1..20: mol_type = other DNA
ttaactatcttacacattcc

SEQ ID NO: 300806 - DNA, 20 bp, synthetic construct
  source 1..20: mol_type = other DNA
gttaactatcttacacattc

SEQ ID NO: 300807 - DNA, 20 bp, synthetic construct
  source 1..20: mol_type = other DNA
tgttaactatcttacacatt

SEQ ID NO: 300808 - DNA, 20 bp, synthetic construct
  source 1..20: mol_type = other DNA
atgttaactatcttacacat

SEQ ID NO: 300809 - DNA, 20 bp, synthetic construct
  source 1..20: mol_type = other DNA
catgttaactatcttacaca

SEQ ID NO: 300810 - DNA, 20 bp, synthetic construct
  source 1..20: mol_type = other DNA
ccatgttaactatcttacac

SEQ ID NO: 300811 - DNA, 20 bp, synthetic construct
  source 1..20: mol_type = other DNA
cccatgttaactatcttaca

SEQ ID NO: 300812 - DNA, 20 bp, synthetic construct
  source 1..20: mol_type = other DNA
gcccatgttaactatcttac

SEQ ID NO: 300813 - DNA, 20 bp, synthetic construct
  source 1..20: mol_type = other DNA
tgcccatgttaactatctta

SEQ ID NO: 300814 - DNA, 20 bp, synthetic construct
  source 1..20: mol_type = other DNA
ttgcccatgttaactatctt

SEQ ID NO: 300815 - DNA, 20 bp, synthetic construct
  source 1..20: mol_type = other DNA
tttgcccatgttaactatct

SEQ ID NO: 300816 - DNA, 20 bp, synthetic construct
  source 1..20: mol_type = other DNA
ctttgcccatgttaactatc

SEQ ID NO: 300817 - DNA, 20 bp, synthetic construct
  source 1..20: mol_type = other DNA
cctttgcccatgttaactat

SEQ ID NO: 300818 - DNA, 20 bp, synthetic construct
  source 1..20: mol_type = other DNA
ccctttgcccatgttaacta

SEQ ID NO: 300819 - DNA, 20 bp, synthetic construct
  source 1..20: mol_type = other DNA
tccctttgcccatgttaact

SEQ ID NO: 300820 - DNA, 20 bp, synthetic construct
  source 1..20: mol_type = other DNA
ctccctttgcccatgttaac

SEQ ID NO: 300821 - DNA, 20 bp, synthetic construct
  source 1..20: mol_type = other DNA
tctccctttgcccatgttaa

SEQ ID NO: 300822 - DNA, 20 bp, synthetic construct
  source 1..20: mol_type = other DNA
atctccctttgcccatgtta

SEQ ID NO: 300823 - DNA, 20 bp, synthetic construct
  source 1..20: mol_type = other DNA
gatctccctttgcccatgtt

SEQ ID NO: 300824 - DNA, 20 bp, synthetic construct
  source 1..20: mol_type = other DNA
agatctccctttgcccatgt

SEQ ID NO: 300825 - DNA, 20 bp, synthetic construct
  source 1..20: mol_type = other DNA
aagatctccctttgcccatg

SEQ ID NO: 300826 - DNA, 20 bp, synthetic construct
  source 1..20: mol_type = other DNA
caagatctccctttgcccat

SEQ ID NO: 300827 - DNA, 20 bp, synthetic construct
  source 1..20: mol_type = other DNA
ccaagatctccctttgccca

SEQ ID NO: 300828 - DNA, 20 bp, synthetic construct
  source 1..20: mol_type = other DNA
cccaagatctccctttgccc

SEQ ID NO: 300829 - DNA, 20 bp, synthetic construct
  source 1..20: mol_type = other DNA
ccccaagatctccctttgcc

SEQ ID NO: 300830 - DNA, 20 bp, synthetic construct
  source 1..20: mol_type = other DNA
accccaagatctccctttgc

SEQ ID NO: 300831 - DNA, 20 bp, synthetic construct
  source 1..20: mol_type = other DNA
caccccaagatctccctttg

SEQ ID NO: 300832 - DNA, 20 bp, synthetic construct
  source 1..20: mol_type = other DNA
gcaccccaagatctcccttt

SEQ ID NO: 300833 - DNA, 20 bp, synthetic construct
  source 1..20: mol_type = other DNA
tgcaccccaagatctccctt

SEQ ID NO: 300834 - DNA, 20 bp, synthetic construct
  source 1..20: mol_type = other DNA
ctgcaccccaagatctccct

SEQ ID NO: 300835 - DNA, 20 bp, synthetic construct
  source 1..20: mol_type = other DNA
gctgcaccccaagatctccc

SEQ ID NO: 300836 - DNA, 20 bp, synthetic construct
  source 1..20: mol_type = other DNA
tgctgcaccccaagatctcc

SEQ ID NO: 300837 - DNA, 20 bp, synthetic construct
  source 1..20: mol_type = other DNA
gtgctgcaccccaagatctc

SEQ ID NO: 300838 - DNA, 20 bp, synthetic construct
  source 1..20: mol_type = other DNA
agtgctgcaccccaagatct

SEQ ID NO: 300839 - DNA, 20 bp, synthetic construct
  source 1..20: mol_type = other DNA
aagtgctgcaccccaagatc

SEQ ID NO: 300840 - DNA, 20 bp, synthetic construct
  source 1..20: mol_type = other DNA
taagtgctgcaccccaagat

SEQ ID NO: 300841 - DNA, 20 bp, synthetic construct
  source 1..20: mol_type = other DNA
ttaagtgctgcaccccaaga

SEQ ID NO: 300842 - DNA, 20 bp, synthetic construct
  source 1..20: mol_type = other DNA
tttaagtgctgcaccccaag

SEQ ID NO: 300843 - DNA, 20 bp, synthetic construct
  source 1..20: mol_type = other DNA
gtttaagtgctgcaccccaa

SEQ ID NO: 300844 - DNA, 20 bp, synthetic construct
  source 1..20: mol_type = other DNA
agtttaagtgctgcacccca

SEQ ID NO: 300845 - DNA, 20 bp, synthetic construct
  source 1..20: mol_type = other DNA
cagtttaagtgctgcacccc

SEQ ID NO: 300846 - DNA, 20 bp, synthetic construct
  source 1..20: mol_type = other DNA
gcagtttaagtgctgcaccc

SEQ ID NO: 300847 - DNA, 20 bp, synthetic construct
  source 1..20: mol_type = other DNA
ggcagtttaagtgctgcacc

SEQ ID NO: 300848 - DNA, 20 bp, synthetic construct
  source 1..20: mol_type = other DNA
aggcagtttaagtgctgcac

SEQ ID NO: 300849 - DNA, 20 bp, synthetic construct
  source 1..20: mol_type = other DNA
gaggcagtttaagtgctgca

SEQ ID NO: 300850 - DNA, 20 bp, synthetic construct
  source 1..20: mol_type = other DNA
cgaggcagtttaagtgctgc

SEQ ID NO: 300851 - DNA, 20 bp, synthetic construct
  source 1..20: mol_type = other DNA
acgaggcagtttaagtgctg

SEQ ID NO: 300852 - DNA, 20 bp, synthetic construct
  source 1..20: mol_type = other DNA
tacgaggcagtttaagtgct

SEQ ID NO: 300853 - DNA, 20 bp, synthetic construct
  source 1..20: mol_type = other DNA
ttacgaggcagtttaagtgc

SEQ ID NO: 300854 - DNA, 20 bp, synthetic construct
  source 1..20: mol_type = other DNA
gttacgaggcagtttaagtg

SEQ ID NO: 300855 - DNA, 20 bp, synthetic construct
  source 1..20: mol_type = other DNA
ggttacgaggcagtttaagt

SEQ ID NO: 300856 - DNA, 20 bp, synthetic construct
  source 1..20: mol_type = other DNA
gggttacgaggcagtttaag

SEQ ID NO: 300857 - DNA, 20 bp, synthetic construct
  source 1..20: mol_type = other DNA
agggttacgaggcagtttaa

SEQ ID NO: 300858 - DNA, 20 bp, synthetic construct
  source 1..20: mol_type = other DNA
aagggttacgaggcagttta

SEQ ID NO: 300859 - DNA, 20 bp, synthetic construct
  source 1..20: mol_type = other DNA
aaagggttacgaggcagttt

SEQ ID NO: 300860 - DNA, 20 bp, synthetic construct
  source 1..20: mol_type = other DNA
aaaagggttacgaggcagtt

SEQ ID NO: 300861 - DNA, 20 bp, synthetic construct
  source 1..20: mol_type = other DNA
gaaaagggttacgaggcagt

SEQ ID NO: 300862 - DNA, 20 bp, synthetic construct
  source 1..20: mol_type = other DNA
tgaaaagggttacgaggcag

SEQ ID NO: 300863 - DNA, 20 bp, synthetic construct
  source 1..20: mol_type = other DNA
atgaaaagggttacgaggca

SEQ ID NO: 300864 - DNA, 20 bp, synthetic construct
  source 1..20: mol_type = other DNA
catgaaaagggttacgaggc

SEQ ID NO: 300865 - DNA, 20 bp, synthetic construct
  source 1..20: mol_type = other DNA
tcatgaaaagggttacgagg

SEQ ID NO: 300866 - DNA, 20 bp, synthetic construct
  source 1..20: mol_type = other DNA
atcatgaaaagggttacgag

SEQ ID NO: 300867 - DNA, 20 bp, synthetic construct
  source 1..20: mol_type = other DNA
aatcatgaaaagggttacga

SEQ ID NO: 300868 - DNA, 20 bp, synthetic construct
  source 1..20: mol_type = other DNA
aaatcatgaaaagggttacg

SEQ ID NO: 300869 - DNA, 20 bp, synthetic construct
  source 1..20: mol_type = other DNA
gaaatcatgaaaagggttac

SEQ ID NO: 300870 - DNA, 20 bp, synthetic construct
  source 1..20: mol_type = other DNA
tgaaatcatgaaaagggtta

SEQ ID NO: 300871 - DNA, 20 bp, synthetic construct
  source 1..20: mol_type = other DNA
ttgaaatcatgaaaagggtt

SEQ ID NO: 300872 - DNA, 20 bp, synthetic construct
  source 1..20: mol_type = other DNA
gttgaaatcatgaaaagggt

SEQ ID NO: 300873 - DNA, 20 bp, synthetic construct
  source 1..20: mol_type = other DNA
ggttgaaatcatgaaaaggg

SEQ ID NO: 300874 - DNA, 20 bp, synthetic construct
  source 1..20: mol_type = other DNA
tggttgaaatcatgaaaagg

SEQ ID NO: 300875 - DNA, 20 bp, synthetic construct
  source 1..20: mol_type = other DNA
gtggttgaaatcatgaaaag

SEQ ID NO: 300876 - DNA, 20 bp, synthetic construct
  source 1..20: mol_type = other DNA
tgtggttgaaatcatgaaaa

SEQ ID NO: 300877 - DNA, 20 bp, synthetic construct
  source 1..20: mol_type = other DNA
atgtggttgaaatcatgaaa

SEQ ID NO: 300878 - DNA, 20 bp, synthetic construct
  source 1..20: mol_type = other DNA
aatgtggttgaaatcatgaa

SEQ ID NO: 300879 - DNA, 20 bp, synthetic construct
  source 1..20: mol_type = other DNA
aaatgtggttgaaatcatga

SEQ ID NO: 300880 - DNA, 20 bp, synthetic construct
  source 1..20: mol_type = other DNA
caaatgtggttgaaatcatg

SEQ ID NO: 300881 - DNA, 20 bp, synthetic construct
  source 1..20: mol_type = other DNA
gcaaatgtggttgaaatcat

SEQ ID NO: 300882 - DNA, 20 bp, synthetic construct
  source 1..20: mol_type = other DNA
agcaaatgtggttgaaatca

SEQ ID NO: 300883 - DNA, 20 bp, synthetic construct
  source 1..20: mol_type = other DNA
tagcaaatgtggttgaaatc

SEQ ID NO: 300884 - DNA, 20 bp, synthetic construct
  source 1..20: mol_type = other DNA
ctagcaaatgtggttgaaat

SEQ ID NO: 300885 - DNA, 20 bp, synthetic construct
  source 1..20: mol_type = other DNA
tctagcaaatgtggttgaaa

SEQ ID NO: 300886 - DNA, 20 bp, synthetic construct
  source 1..20: mol_type = other DNA
ctctagcaaatgtggttgaa

SEQ ID NO: 300887 - DNA, 20 bp, synthetic construct
  source 1..20: mol_type = other DNA
cctctagcaaatgtggttga

SEQ ID NO: 300888 - DNA, 20 bp, synthetic construct
  source 1..20: mol_type = other DNA
ccctctagcaaatgtggttg

SEQ ID NO: 300889 - DNA, 20 bp, synthetic construct
  source 1..20: mol_type = other DNA
tccctctagcaaatgtggtt

SEQ ID NO: 300890 - DNA, 20 bp, synthetic construct
  source 1..20: mol_type = other DNA
ctccctctagcaaatgtggt

SEQ ID NO: 300891 - DNA, 20 bp, synthetic construct
  source 1..20: mol_type = other DNA
cctccctctagcaaatgtgg

SEQ ID NO: 300892 - DNA, 20 bp, synthetic construct
  source 1..20: mol_type = other DNA
ccctccctctagcaaatgtg

SEQ ID NO: 300893 - DNA, 20 bp, synthetic construct
  source 1..20: mol_type = other DNA
tccctccctctagcaaatgt

SEQ ID NO: 300894 - DNA, 20 bp, synthetic construct
  source 1..20: mol_type = other DNA
ctccctccctctagcaaatg

SEQ ID NO: 300895 - DNA, 20 bp, synthetic construct
  source 1..20: mol_type = other DNA
gctccctccctctagcaaat

SEQ ID NO: 300896 - DNA, 20 bp, synthetic construct
  source 1..20: mol_type = other DNA
tgctccctccctctagcaaa

SEQ ID NO: 300897 - DNA, 20 bp, synthetic construct
  source 1..20: mol_type = other DNA
ctgctccctccctctagcaa

SEQ ID NO: 300898 - DNA, 20 bp, synthetic construct
  source 1..20: mol_type = other DNA
gctgctccctccctctagca

SEQ ID NO: 300899 - DNA, 20 bp, synthetic construct
  source 1..20: mol_type = other DNA
ggctgctccctccctctagc

SEQ ID NO: 300900 - DNA, 20 bp, synthetic construct
  source 1..20: mol_type = other DNA
tggctgctccctccctctag

SEQ ID NO: 300901 - DNA, 20 bp, synthetic construct
  source 1..20: mol_type = other DNA
gtggctgctccctccctcta

SEQ ID NO: 300902 - DNA, 20 bp, synthetic construct
  source 1..20: mol_type = other DNA
cgtggctgctccctccctct

SEQ ID NO: 300903 - DNA, 20 bp, synthetic construct
  source 1..20: mol_type = other DNA
ccgtggctgctccctccctc

SEQ ID NO: 300904 - DNA, 20 bp, synthetic construct
  source 1..20: mol_type = other DNA
tccgtggctgctccctccct

SEQ ID NO: 300905 - DNA, 20 bp, synthetic construct
  source 1..20: mol_type = other DNA
ctccgtggctgctccctccc

SEQ ID NO: 300906 - DNA, 20 bp, synthetic construct
  source 1..20: mol_type = other DNA
actccgtggctgctccctcc

SEQ ID NO: 300907 - DNA, 20 bp, synthetic construct
  source 1..20: mol_type = other DNA
aactccgtggctgctccctc

SEQ ID NO: 300908 - DNA, 20 bp, synthetic construct
  source 1..20: mol_type = other DNA
taactccgtggctgctccct

SEQ ID NO: 300909 - DNA, 20 bp, synthetic construct
  source 1..20: mol_type = other DNA
ctaactccgtggctgctccc

SEQ ID NO: 300910 - DNA, 20 bp, synthetic construct
  source 1..20: mol_type = other DNA
tctaactccgtggctgctcc

SEQ ID NO: 300911 - DNA, 20 bp, synthetic construct
  source 1..20: mol_type = other DNA
ctctaactccgtggctgctc

SEQ ID NO: 300912 - DNA, 20 bp, synthetic construct
  source 1..20: mol_type = other DNA
cctctaactccgtggctgct

SEQ ID NO: 300913 - DNA, 20 bp, synthetic construct
  source 1..20: mol_type = other DNA
gcctctaactccgtggctgc

SEQ ID NO: 300914 - DNA, 20 bp, synthetic construct
  source 1..20: mol_type = other DNA
ggcctctaactccgtggctg

SEQ ID NO: 300915 - DNA, 20 bp, synthetic construct
  source 1..20: mol_type = other DNA
gggcctctaactccgtggct

SEQ ID NO: 300916 - DNA, 20 bp, synthetic construct
  source 1..20: mol_type = other DNA
agggcctctaactccgtggc

SEQ ID NO: 300917 - DNA, 20 bp, synthetic construct
  source 1..20: mol_type = other DNA
aagggcctctaactccgtgg

SEQ ID NO: 300918 - DNA, 20 bp, synthetic construct
  source 1..20: mol_type = other DNA
caagggcctctaactccgtg

SEQ ID NO: 300919 - DNA, 20 bp, synthetic construct
  source 1..20: mol_type = other DNA
ccaagggcctctaactccgt

SEQ ID NO: 300920 - DNA, 20 bp, synthetic construct
  source 1..20: mol_type = other DNA
cccaagggcctctaactccg

SEQ ID NO: 300921 - DNA, 20 bp, synthetic construct
  source 1..20: mol_type = other DNA
ccccaagggcctctaactcc

SEQ ID NO: 300922 - DNA, 20 bp, synthetic construct
  source 1..20: mol_type = other DNA
accccaagggcctctaactc

SEQ ID NO: 300923 - DNA, 20 bp, synthetic construct
  source 1..20: mol_type = other DNA
aaccccaagggcctctaact

SEQ ID NO: 300924 - DNA, 20 bp, synthetic construct
  source 1..20: mol_type = other DNA
aaaccccaagggcctctaac

SEQ ID NO: 300925 - DNA, 20 bp, synthetic construct
  source 1..20: mol_type = other DNA
gaaaccccaagggcctctaa

SEQ ID NO: 300926 - DNA, 20 bp, synthetic construct
  source 1..20: mol_type = other DNA
agaaaccccaagggcctcta

SEQ ID NO: 300927 - DNA, 20 bp, synthetic construct
  source 1..20: mol_type = other DNA
gagaaaccccaagggcctct

SEQ ID NO: 300928 - DNA, 20 bp, synthetic construct
  source 1..20: mol_type = other DNA
agagaaaccccaagggcctc

SEQ ID NO: 300929 - DNA, 20 bp, synthetic construct
  source 1..20: mol_type = other DNA
aagagaaaccccaagggcct

SEQ ID NO: 300930 - DNA, 20 bp, synthetic construct
  source 1..20: mol_type = other DNA
aaagagaaaccccaagggcc

SEQ ID NO: 300931 - DNA, 20 bp, synthetic construct
  source 1..20: mol_type = other DNA
aaaagagaaaccccaagggc

SEQ ID NO: 300932 - DNA, 20 bp, synthetic construct
  source 1..20: mol_type = other DNA
gaaaagagaaaccccaaggg

SEQ ID NO: 300933 - DNA, 20 bp, synthetic construct
  source 1..20: mol_type = other DNA
ggaaaagagaaaccccaagg

SEQ ID NO: 300934 - DNA, 20 bp, synthetic construct
  source 1..20: mol_type = other DNA
tggaaaagagaaaccccaag

SEQ ID NO: 300935 - DNA, 20 bp, synthetic construct
  source 1..20: mol_type = other DNA
gtggaaaagagaaaccccaa

SEQ ID NO: 300936 - DNA, 20 bp, synthetic construct
  source 1..20: mol_type = other DNA
agtggaaaagagaaacccca

SEQ ID NO: 300937 - DNA, 20 bp, synthetic construct
  source 1..20: mol_type = other DNA
cagtggaaaagagaaacccc

SEQ ID NO: 300938 - DNA, 20 bp, synthetic construct
  source 1..20: mol_type = other DNA
tcagtggaaaagagaaaccc

SEQ ID NO: 300939 - DNA, 20 bp, synthetic construct
  source 1..20: mol_type = other DNA
gtcagtggaaaagagaaacc

SEQ ID NO: 300940 - DNA, 20 bp, synthetic construct
  source 1..20: mol_type = other DNA
tgtcagtggaaaagagaaac

SEQ ID NO: 300941 - DNA, 20 bp, synthetic construct
  source 1..20: mol_type = other DNA
ctgtcagtggaaaagagaaa

SEQ ID NO: 300942 - DNA, 20 bp, synthetic construct
  source 1..20: mol_type = other DNA
cctgtcagtggaaaagagaa

SEQ ID NO: 300943 - DNA, 20 bp, synthetic construct
  source 1..20: mol_type = other DNA
gcctgtcagtggaaaagaga

SEQ ID NO: 300944 - DNA, 20 bp, synthetic construct
  source 1..20: mol_type = other DNA
agcctgtcagtggaaaagag

SEQ ID NO: 300945 - DNA, 20 bp, synthetic construct
  source 1..20: mol_type = other DNA
aagcctgtcagtggaaaaga

SEQ ID NO: 300946 - DNA, 20 bp, synthetic construct
  source 1..20: mol_type = other DNA
aaagcctgtcagtggaaaag

SEQ ID NO: 300947 - DNA, 20 bp, synthetic construct
  source 1..20: mol_type = other DNA
gaaagcctgtcagtggaaaa

SEQ ID NO: 300948 - DNA, 20 bp, synthetic construct
  source 1..20: mol_type = other DNA
ggaaagcctgtcagtggaaa

SEQ ID NO: 300949 - DNA, 20 bp, synthetic construct
  source 1..20: mol_type = other DNA
gggaaagcctgtcagtggaa

SEQ ID NO: 300950 - DNA, 20 bp, synthetic construct
  source 1..20: mol_type = other DNA
tgggaaagcctgtcagtgga

SEQ ID NO: 300951 - DNA, 20 bp, synthetic construct
  source 1..20: mol_type = other DNA
ctgggaaagcctgtcagtgg

SEQ ID NO: 300952 - DNA, 20 bp, synthetic construct
  source 1..20: mol_type = other DNA
cctgggaaagcctgtcagtg

SEQ ID NO: 300953 - DNA, 20 bp, synthetic construct
  source 1..20: mol_type = other DNA
gcctgggaaagcctgtcagt

SEQ ID NO: 300954 - DNA, 20 bp, synthetic construct
  source 1..20: mol_type = other DNA
tgcctgggaaagcctgtcag

SEQ ID NO: 300955 - DNA, 20 bp, synthetic construct
  source 1..20: mol_type = other DNA
ctgcctgggaaagcctgtca

SEQ ID NO: 300956 - DNA, 20 bp, synthetic construct
  source 1..20: mol_type = other DNA
gctgcctgggaaagcctgtc

SEQ ID NO: 300957 - DNA, 20 bp, synthetic construct
  source 1..20: mol_type = other DNA
agctgcctgggaaagcctgt

SEQ ID NO: 300958 - DNA, 20 bp, synthetic construct
  source 1..20: mol_type = other DNA
cagctgcctgggaaagcctg

SEQ ID NO: 300959 - DNA, 20 bp, synthetic construct
  source 1..20: mol_type = other DNA
ccagctgcctgggaaagcct

SEQ ID NO: 300960 - DNA, 20 bp, synthetic construct
  source 1..20: mol_type = other DNA
gccagctgcctgggaaagcc

SEQ ID NO: 300961 - DNA, 20 bp, synthetic construct
  source 1..20: mol_type = other DNA
agccagctgcctgggaaagc

SEQ ID NO: 300962 - DNA, 20 bp, synthetic construct
  source 1..20: mol_type = other DNA
tagccagctgcctgggaaag

SEQ ID NO: 300963 - DNA, 20 bp, synthetic construct
  source 1..20: mol_type = other DNA
ctagccagctgcctgggaaa

SEQ ID NO: 300964 - DNA, 20 bp, synthetic construct
  source 1..20: mol_type = other DNA
actagccagctgcctgggaa

SEQ ID NO: 300965 - DNA, 20 bp, synthetic construct
  source 1..20: mol_type = other DNA
aactagccagctgcctggga

SEQ ID NO: 300966 - DNA, 20 bp, synthetic construct
  source 1..20: mol_type = other DNA
gaactagccagctgcctggg

SEQ ID NO: 300967 - DNA, 20 bp, synthetic construct
  source 1..20: mol_type = other DNA
tgaactagccagctgcctgg

SEQ ID NO: 300968 - DNA, 20 bp, synthetic construct
  source 1..20: mol_type = other DNA
atgaactagccagctgcctg

SEQ ID NO: 300969 - DNA, 20 bp, synthetic construct
  source 1..20: mol_type = other DNA
aatgaactagccagctgcct

SEQ ID NO: 300970 - DNA, 20 bp, synthetic construct
  source 1..20: mol_type = other DNA
gaatgaactagccagctgcc

SEQ ID NO: 300971 - DNA, 20 bp, synthetic construct
  source 1..20: mol_type = other DNA
ggaatgaactagccagctgc

SEQ ID NO: 300972 - DNA, 20 bp, synthetic construct
  source 1..20: mol_type = other DNA
gggaatgaactagccagctg

SEQ ID NO: 300973 - DNA, 20 bp, synthetic construct
  source 1..20: mol_type = other DNA
agggaatgaactagccagct

SEQ ID NO: 300974 - DNA, 20 bp, synthetic construct
  source 1..20: mol_type = other DNA
gagggaatgaactagccagc

SEQ ID NO: 300975 - DNA, 20 bp, synthetic construct
  source 1..20: mol_type = other DNA
ggagggaatgaactagccag

SEQ ID NO: 300976 - DNA, 20 bp, synthetic construct
  source 1..20: mol_type = other DNA
gggagggaatgaactagcca

SEQ ID NO: 300977 - DNA, 20 bp, synthetic construct
  source 1..20: mol_type = other DNA
ggggagggaatgaactagcc

SEQ ID NO: 300978 - DNA, 20 bp, synthetic construct
  source 1..20: mol_type = other DNA
tggggagggaatgaactagc

SEQ ID NO: 300979 - DNA, 20 bp, synthetic construct
  source 1..20: mol_type = other DNA
ctggggagggaatgaactag

SEQ ID NO: 300980 - DNA, 20 bp, synthetic construct
  source 1..20: mol_type = other DNA
gctggggagggaatgaacta

SEQ ID NO: 300981 - DNA, 20 bp, synthetic construct
  source 1..20: mol_type = other DNA
ggctggggagggaatgaact

SEQ ID NO: 300982 - DNA, 20 bp, synthetic construct
  source 1..20: mol_type = other DNA
tggctggggagggaatgaac

SEQ ID NO: 300983 - DNA, 20 bp, synthetic construct
  source 1..20: mol_type = other DNA
ctggctggggagggaatgaa

SEQ ID NO: 300984 - DNA, 20 bp, synthetic construct
  source 1..20: mol_type = other DNA
cctggctggggagggaatga

SEQ ID NO: 300985 - DNA, 20 bp, synthetic construct
  source 1..20: mol_type = other DNA
acctggctggggagggaatg

SEQ ID NO: 300986 - DNA, 20 bp, synthetic construct
  source 1..20: mol_type = other DNA
cacctggctggggagggaat

SEQ ID NO: 300987 - DNA, 20 bp, synthetic construct
  source 1..20: mol_type = other DNA
gcacctggctggggagggaa

SEQ ID NO: 300988 - DNA, 20 bp, synthetic construct
  source 1..20: mol_type = other DNA
tgcacctggctggggaggga

SEQ ID NO: 300989 - DNA, 20 bp, synthetic construct
  source 1..20: mol_type = other DNA
ctgcacctggctggggaggg

SEQ ID NO: 300990 - DNA, 20 bp, synthetic construct
  source 1..20: mol_type = other DNA
cctgcacctggctggggagg

SEQ ID NO: 300991 - DNA, 20 bp, synthetic construct
  source 1..20: mol_type = other DNA
gcctgcacctggctggggag

SEQ ID NO: 300992 - DNA, 20 bp, synthetic construct
  source 1..20: mol_type = other DNA
cgcctgcacctggctgggga

SEQ ID NO: 300993 - DNA, 20 bp, synthetic construct
  source 1..20: mol_type = other DNA
acgcctgcacctggctgggg

SEQ ID NO: 300994 - DNA, 20 bp, synthetic construct
  source 1..20: mol_type = other DNA
tacgcctgcacctggctggg

SEQ ID NO: 300995 - DNA, 20 bp, synthetic construct
  source 1..20: mol_type = other DNA
ctacgcctgcacctggctgg

SEQ ID NO: 300996 - DNA, 20 bp, synthetic construct
  source 1..20: mol_type = other DNA
cctacgcctgcacctggctg

SEQ ID NO: 300997 - DNA, 20 bp, synthetic construct
  source 1..20: mol_type = other DNA
tcctacgcctgcacctggct

SEQ ID NO: 300998 - DNA, 20 bp, synthetic construct
  source 1..20: mol_type = other DNA
ttcctacgcctgcacctggc

SEQ ID NO: 300999 - DNA, 20 bp, synthetic construct
  source 1..20: mol_type = other DNA
attcctacgcctgcacctgg

SEQ ID NO: 301000 - DNA, 20 bp, synthetic construct
  source 1..20: mol_type = other DNA
tattcctacgcctgcacctg

SEQ ID NO: 301001 - DNA, 20 bp, synthetic construct
  source 1..20: mol_type = other DNA
atattcctacgcctgcacct

SEQ ID NO: 301002 - DNA, 20 bp, synthetic construct
  source 1..20: mol_type = other DNA
catattcctacgcctgcacc

SEQ ID NO: 301003 - DNA, 20 bp, synthetic construct
  source 1..20: mol_type = other DNA
ccatattcctacgcctgcac

SEQ ID NO: 301004 - DNA, 20 bp, synthetic construct
  source 1..20: mol_type = other DNA
tccatattcctacgcctgca

SEQ ID NO: 301005 - DNA, 20 bp, synthetic construct
  source 1..20: mol_type = other DNA
gtccatattcctacgcctgc

SEQ ID NO: 301006 - DNA, 20 bp, synthetic construct
  source 1..20: mol_type = other DNA
tgtccatattcctacgcctg

SEQ ID NO: 301007 - DNA, 20 bp, synthetic construct
  source 1..20: mol_type = other DNA
atgtccatattcctacgcct

SEQ ID NO: 301008 - DNA, 20 bp, synthetic construct
  source 1..20: mol_type = other DNA
gatgtccatattcctacgcc

SEQ ID NO: 301009 - DNA, 20 bp, synthetic construct
  source 1..20: mol_type = other DNA
agatgtccatattcctacgc

SEQ ID NO: 301010 - DNA, 20 bp, synthetic construct
  source 1..20: mol_type = other DNA
cagatgtccatattcctacg

SEQ ID NO: 301011 - DNA, 20 bp, synthetic construct
  source 1..20: mol_type = other DNA
ccagatgtccatattcctac

SEQ ID NO: 301012 - DNA, 20 bp, synthetic construct
  source 1..20: mol_type = other DNA
accagatgtccatattccta

SEQ ID NO: 301013 - DNA, 20 bp, synthetic construct
  source 1..20: mol_type = other DNA
aaccagatgtccatattcct

SEQ ID NO: 301014 - DNA, 20 bp, synthetic construct
  source 1..20: mol_type = other DNA
caaccagatgtccatattcc

SEQ ID NO: 301015 - DNA, 20 bp, synthetic construct
  source 1..20: mol_type = other DNA
gcaaccagatgtccatattc

SEQ ID NO: 301016 - DNA, 20 bp, synthetic construct
  source 1..20: mol_type = other DNA
agcaaccagatgtccatatt

SEQ ID NO: 301017 - DNA, 20 bp, synthetic construct
  source 1..20: mol_type = other DNA
aagcaaccagatgtccatat

SEQ ID NO: 301018 - DNA, 20 bp, synthetic construct
  source 1..20: mol_type = other DNA
aaagcaaccagatgtccata

SEQ ID NO: 301019 - DNA, 20 bp, synthetic construct
  source 1..20: mol_type = other DNA
caaagcaaccagatgtccat

SEQ ID NO: 301020 - DNA, 20 bp, synthetic construct
  source 1..20: mol_type = other DNA
ccaaagcaaccagatgtcca

SEQ ID NO: 301021 - DNA, 20 bp, synthetic construct
  source 1..20: mol_type = other DNA
gccaaagcaaccagatgtcc

SEQ ID NO: 301022 - DNA, 20 bp, synthetic construct
  source 1..20: mol_type = other DNA
ggccaaagcaaccagatgtc

SEQ ID NO: 301023 - DNA, 20 bp, synthetic construct
  source 1..20: mol_type = other DNA
aggccaaagcaaccagatgt

SEQ ID NO: 301024 - DNA, 20 bp, synthetic construct
  source 1..20: mol_type = other DNA
caggccaaagcaaccagatg

SEQ ID NO: 301025 - DNA, 20 bp, synthetic construct
  source 1..20: mol_type = other DNA
gcaggccaaagcaaccagat

SEQ ID NO: 301026 - DNA, 20 bp, synthetic construct
  source 1..20: mol_type = other DNA
agcaggccaaagcaaccaga

SEQ ID NO: 301027 - DNA, 20 bp, synthetic construct
  source 1..20: mol_type = other DNA
cagcaggccaaagcaaccag

SEQ ID NO: 301028 - DNA, 20 bp, synthetic construct
  source 1..20: mol_type = other DNA
gcagcaggccaaagcaacca

SEQ ID NO: 301029 - DNA, 20 bp, synthetic construct
  source 1..20: mol_type = other DNA
ggcagcaggccaaagcaacc

SEQ ID NO: 301030 - DNA, 20 bp, synthetic construct
  source 1..20: mol_type = other DNA
gggcagcaggccaaagcaac

SEQ ID NO: 301031 - DNA, 20 bp, synthetic construct
  source 1..20: mol_type = other DNA
agggcagcaggccaaagcaa

SEQ ID NO: 301032 - DNA, 20 bp, synthetic construct
  source 1..20: mol_type = other DNA
gagggcagcaggccaaagca

SEQ ID NO: 301033 - DNA, 20 bp, synthetic construct
  source 1..20: mol_type = other DNA
agagggcagcaggccaaagc

SEQ ID NO: 301034 - DNA, 20 bp, synthetic construct
  source 1..20: mol_type = other DNA
aagagggcagcaggccaaag

SEQ ID NO: 301035 - DNA, 20 bp, synthetic construct
  source 1..20: mol_type = other DNA
aaagagggcagcaggccaaa

SEQ ID NO: 301036 - DNA, 20 bp, synthetic construct
  source 1..20: mol_type = other DNA
gaaagagggcagcaggccaa

SEQ ID NO: 301037 - DNA, 20 bp, synthetic construct
  source 1..20: mol_type = other DNA
tgaaagagggcagcaggcca

SEQ ID NO: 301038 - DNA, 20 bp, synthetic construct
  source 1..20: mol_type = other DNA
ctgaaagagggcagcaggcc

SEQ ID NO: 301039 - DNA, 20 bp, synthetic construct
  source 1..20: mol_type = other DNA
cctgaaagagggcagcaggc

SEQ ID NO: 301040 - DNA, 20 bp, synthetic construct
  source 1..20: mol_type = other DNA
ccctgaaagagggcagcagg

SEQ ID NO: 301041 - DNA, 20 bp, synthetic construct
  source 1..20: mol_type = other DNA
cccctgaaagagggcagcag

SEQ ID NO: 301042 - DNA, 20 bp, synthetic construct
  source 1..20: mol_type = other DNA
acccctgaaagagggcagca

SEQ ID NO: 301043 - DNA, 20 bp, synthetic construct
  source 1..20: mol_type = other DNA
gacccctgaaagagggcagc

SEQ ID NO: 301044 - DNA, 20 bp, synthetic construct
  source 1..20: mol_type = other DNA
ggacccctgaaagagggcag

SEQ ID NO: 301045 - DNA, 20 bp, synthetic construct
  source 1..20: mol_type = other DNA
aggacccctgaaagagggca

SEQ ID NO: 301046 - DNA, 20 bp, synthetic construct
  source 1..20: mol_type = other DNA
taggacccctgaaagagggc

SEQ ID NO: 301047 - DNA, 20 bp, synthetic construct
  source 1..20: mol_type = other DNA
ttaggacccctgaaagaggg

SEQ ID NO: 301048 - DNA, 20 bp, synthetic construct
  source 1..20: mol_type = other DNA
cttaggacccctgaaagagg

SEQ ID NO: 301049 - DNA, 20 bp, synthetic construct
  source 1..20: mol_type = other DNA
gcttaggacccctgaaagag

SEQ ID NO: 301050 - DNA, 20 bp, synthetic construct
  source 1..20: mol_type = other DNA
ggcttaggacccctgaaaga

SEQ ID NO: 301051 - DNA, 20 bp, synthetic construct
  source 1..20: mol_type = other DNA
gggcttaggacccctgaaag

SEQ ID NO: 301052 - DNA, 20 bp, synthetic construct
  source 1..20: mol_type = other DNA
tgggcttaggacccctgaaa

SEQ ID NO: 301053 - DNA, 20 bp, synthetic construct
  source 1..20: mol_type = other DNA
gtgggcttaggacccctgaa

SEQ ID NO: 301054 - DNA, 20 bp, synthetic construct
  source 1..20: mol_type = other DNA
tgtgggcttaggacccctga

SEQ ID NO: 301055 - DNA, 20 bp, synthetic construct
  source 1..20: mol_type = other DNA
ttgtgggcttaggacccctg

SEQ ID NO: 301056 - DNA, 20 bp, synthetic construct
  source 1..20: mol_type = other DNA
attgtgggcttaggacccct

SEQ ID NO: 301057 - DNA, 20 bp, synthetic construct
  source 1..20: mol_type = other DNA
gattgtgggcttaggacccc

SEQ ID NO: 301058 - DNA, 20 bp, synthetic construct
  source 1..20: mol_type = other DNA
tgattgtgggcttaggaccc

SEQ ID NO: 301059 - DNA, 20 bp, synthetic construct
  source 1..20: mol_type = other DNA
atgattgtgggcttaggacc

SEQ ID NO: 301060 - DNA, 20 bp, synthetic construct
  source 1..20: mol_type = other DNA
catgattgtgggcttaggac

SEQ ID NO: 301061 - DNA, 20 bp, synthetic construct
  source 1..20: mol_type = other DNA
gcatgattgtgggcttagga

SEQ ID NO: 301062 - DNA, 20 bp, synthetic construct
  source 1..20: mol_type = other DNA
ggcatgattgtgggcttagg

SEQ ID NO: 301063 - DNA, 20 bp, synthetic construct
  source 1..20: mol_type = other DNA
aggcatgattgtgggcttag

SEQ ID NO: 301064 - DNA, 20 bp, synthetic construct
  source 1..20: mol_type = other DNA
gaggcatgattgtgggctta

SEQ ID NO: 301065 - DNA, 20 bp, synthetic construct
  source 1..20: mol_type = other DNA
ggaggcatgattgtgggctt

SEQ ID NO: 301066 - DNA, 20 bp, synthetic construct
  source 1..20: mol_type = other DNA
gggaggcatgattgtgggct

SEQ ID NO: 301067 - DNA, 20 bp, synthetic construct
  source 1..20: mol_type = other DNA
agggaggcatgattgtgggc

SEQ ID NO: 301068 - DNA, 20 bp, synthetic construct
  source 1..20: mol_type = other DNA
tagggaggcatgattgtggg

SEQ ID NO: 301069 - DNA, 20 bp, synthetic construct
  source 1..20: mol_type = other DNA
ttagggaggcatgattgtgg

SEQ ID NO: 301070 - DNA, 20 bp, synthetic construct
  source 1..20: mol_type = other DNA
cttagggaggcatgattgtg

SEQ ID NO: 301071 - DNA, 20 bp, synthetic construct
  source 1..20: mol_type = other DNA
tcttagggaggcatgattgt

SEQ ID NO: 301072 - DNA, 20 bp, synthetic construct
  source 1..20: mol_type = other DNA
gtcttagggaggcatgattg

SEQ ID NO: 301073 - DNA, 20 bp, synthetic construct
  source 1..20: mol_type = other DNA
ggtcttagggaggcatgatt

SEQ ID NO: 301074 - DNA, 20 bp, synthetic construct
  source 1..20: mol_type = other DNA
aggtcttagggaggcatgat

SEQ ID NO: 301075 - DNA, 20 bp, synthetic construct
  source 1..20: mol_type = other DNA
aaggtcttagggaggcatga

SEQ ID NO: 301076 - DNA, 20 bp, synthetic construct
  source 1..20: mol_type = other DNA
caaggtcttagggaggcatg

SEQ ID NO: 301077 - DNA, 20 bp, synthetic construct
  source 1..20: mol_type = other DNA
ccaaggtcttagggaggcat

SEQ ID NO: 301078 - DNA, 20 bp, synthetic construct
  source 1..20: mol_type = other DNA
gccaaggtcttagggaggca

SEQ ID NO: 301079 - DNA, 20 bp, synthetic construct
  source 1..20: mol_type = other DNA
tgccaaggtcttagggaggc

SEQ ID NO: 301080 - DNA, 20 bp, synthetic construct
  source 1..20: mol_type = other DNA
atgccaaggtcttagggagg

SEQ ID NO: 301081 - DNA, 20 bp, synthetic construct
  source 1..20: mol_type = other DNA
gatgccaaggtcttagggag

SEQ ID NO: 301082 - DNA, 20 bp, synthetic construct
  source 1..20: mol_type = other DNA
ggatgccaaggtcttaggga

SEQ ID NO: 301083 - DNA, 20 bp, synthetic construct
  source 1..20: mol_type = other DNA
aggatgccaaggtcttaggg

SEQ ID NO: 301084 - DNA, 20 bp, synthetic construct
  source 1..20: mol_type = other DNA
aaggatgccaaggtcttagg

SEQ ID NO: 301085 - DNA, 20 bp, synthetic construct
  source 1..20: mol_type = other DNA
gaaggatgccaaggtcttag

SEQ ID NO: 301086 - DNA, 20 bp, synthetic construct
  source 1..20: mol_type = other DNA
ggaaggatgccaaggtctta

SEQ ID NO: 301087 - DNA, 20 bp, synthetic construct
  source 1..20: mol_type = other DNA
gggaaggatgccaaggtctt

SEQ ID NO: 301088 - DNA, 20 bp, synthetic construct
  source 1..20: mol_type = other DNA
agggaaggatgccaaggtct

SEQ ID NO: 301089 - DNA, 20 bp, synthetic construct
  source 1..20: mol_type = other DNA
gagggaaggatgccaaggtc

SEQ ID NO: 301090 - DNA, 20 bp, synthetic construct
  source 1..20: mol_type = other DNA
agagggaaggatgccaaggt

SEQ ID NO: 301091 - DNA, 20 bp, synthetic construct
  source 1..20: mol_type = other DNA
tagagggaaggatgccaagg

SEQ ID NO: 301092 - DNA, 20 bp, synthetic construct
  source 1..20: mol_type = other DNA
ttagagggaaggatgccaag

SEQ ID NO: 301093 - DNA, 20 bp, synthetic construct
  source 1..20: mol_type = other DNA
cttagagggaaggatgccaa

SEQ ID NO: 301094 - DNA, 20 bp, synthetic construct
  source 1..20: mol_type = other DNA
gcttagagggaaggatgcca

SEQ ID NO: 301095 - DNA, 20 bp, synthetic construct
  source 1..20: mol_type = other DNA
ggcttagagggaaggatgcc

SEQ ID NO: 301096 - DNA, 20 bp, synthetic construct
  source 1..20: mol_type = other DNA
cggcttagagggaaggatgc

SEQ ID NO: 301097 - DNA, 20 bp, synthetic construct
  source 1..20: mol_type = other DNA
acggcttagagggaaggatg

SEQ ID NO: 301098 - DNA, 20 bp, synthetic construct
  source 1..20: mol_type = other DNA
aacggcttagagggaaggat

SEQ ID NO: 301099 - DNA, 20 bp, synthetic construct
  source 1..20: mol_type = other DNA
caacggcttagagggaagga

SEQ ID NO: 301100 - DNA, 20 bp, synthetic construct
  source 1..20: mol_type = other DNA
ccaacggcttagagggaagg

SEQ ID NO: 301101 - DNA, 20 bp, synthetic construct
  source 1..20: mol_type = other DNA
gccaacggcttagagggaag

SEQ ID NO: 301102 - DNA, 20 bp, synthetic construct
  source 1..20: mol_type = other DNA
tgccaacggcttagagggaa

SEQ ID NO: 301103 - DNA, 20 bp, synthetic construct
  source 1..20: mol_type = other DNA
gtgccaacggcttagaggga

SEQ ID NO: 301104 - DNA, 20 bp, synthetic construct
  source 1..20: mol_type = other DNA
ggtgccaacggcttagaggg

SEQ ID NO: 301105 - DNA, 20 bp, synthetic construct
  source 1..20: mol_type = other DNA
aggtgccaacggcttagagg

SEQ ID NO: 301106 - DNA, 20 bp, synthetic construct
  source 1..20: mol_type = other DNA
gaggtgccaacggcttagag

SEQ ID NO: 301107 - DNA, 20 bp, synthetic construct
  source 1..20: mol_type = other DNA
agaggtgccaacggcttaga

SEQ ID NO: 301108 - DNA, 20 bp, synthetic construct
  source 1..20: mol_type = other DNA
cagaggtgccaacggcttag

SEQ ID NO: 301109 - DNA, 20 bp, synthetic construct
  source 1..20: mol_type = other DNA
acagaggtgccaacggctta

SEQ ID NO: 301110 - DNA, 20 bp, synthetic construct
  source 1..20: mol_type = other DNA
cacagaggtgccaacggctt

SEQ ID NO: 301111 - DNA, 20 bp, synthetic construct
  source 1..20: mol_type = other DNA
gcacagaggtgccaacggct

SEQ ID NO: 301112 - DNA, 20 bp, synthetic construct
  source 1..20: mol_type = other DNA
ggcacagaggtgccaacggc

SEQ ID NO: 301113 - DNA, 20 bp, synthetic construct
  source 1..20: mol_type = other DNA
tggcacagaggtgccaacgg

SEQ ID NO: 301114 - DNA, 20 bp, synthetic construct
  source 1..20: mol_type = other DNA
gtggcacagaggtgccaacg

SEQ ID NO: 301115 - DNA, 20 bp, synthetic construct
  source 1..20: mol_type = other DNA
ggtggcacagaggtgccaac

SEQ ID NO: 301116 - DNA, 20 bp, synthetic construct
  source 1..20: mol_type = other DNA
aggtggcacagaggtgccaa

SEQ ID NO: 301117 - DNA, 20 bp, synthetic construct
  source 1..20: mol_type = other DNA
gaggtggcacagaggtgcca

SEQ ID NO: 301118 - DNA, 20 bp, synthetic construct
  source 1..20: mol_type = other DNA
agaggtggcacagaggtgcc

SEQ ID NO: 301119 - DNA, 20 bp, synthetic construct
  source 1..20: mol_type = other DNA
gagaggtggcacagaggtgc

SEQ ID NO: 301120 - DNA, 20 bp, synthetic construct
  source 1..20: mol_type = other DNA
tgagaggtggcacagaggtg

SEQ ID NO: 301121 - DNA, 20 bp, synthetic construct
  source 1..20: mol_type = other DNA
gtgagaggtggcacagaggt

SEQ ID NO: 301122 - DNA, 20 bp, synthetic construct
  source 1..20: mol_type = other DNA
tgtgagaggtggcacagagg

SEQ ID NO: 301123 - DNA, 20 bp, synthetic construct
  source 1..20: mol_type = other DNA
gtgtgagaggtggcacagag

SEQ ID NO: 301124 - DNA, 20 bp, synthetic construct
  source 1..20: mol_type = other DNA
agtgtgagaggtggcacaga

SEQ ID NO: 301125 - DNA, 20 bp, synthetic construct
  source 1..20: mol_type = other DNA
cagtgtgagaggtggcacag

SEQ ID NO: 301126 - DNA, 20 bp, synthetic construct
  source 1..20: mol_type = other DNA
ccagtgtgagaggtggcaca

SEQ ID NO: 301127 - DNA, 20 bp, synthetic construct
  source 1..20: mol_type = other DNA
gccagtgtgagaggtggcac

SEQ ID NO: 301128 - DNA, 20 bp, synthetic construct
  source 1..20: mol_type = other DNA
agccagtgtgagaggtggca

SEQ ID NO: 301129 - DNA, 20 bp, synthetic construct
  source 1..20: mol_type = other DNA
gagccagtgtgagaggtggc

SEQ ID NO: 301130 - DNA, 20 bp, synthetic construct
  source 1..20: mol_type = other DNA
ggagccagtgtgagaggtgg

SEQ ID NO: 301131 - DNA, 20 bp, synthetic construct
  source 1..20: mol_type = other DNA
tggagccagtgtgagaggtg

SEQ ID NO: 301132 - DNA, 20 bp, synthetic construct
  source 1..20: mol_type = other DNA
ctggagccagtgtgagaggt

SEQ ID NO: 301133 - DNA, 20 bp, synthetic construct
  source 1..20: mol_type = other DNA
tctggagccagtgtgagagg

SEQ ID NO: 301134 - DNA, 20 bp, synthetic construct
  source 1..20: mol_type = other DNA
gtctggagccagtgtgagag

SEQ ID NO: 301135 - DNA, 20 bp, synthetic construct
  source 1..20: mol_type = other DNA
tgtctggagccagtgtgaga

SEQ ID NO: 301136 - DNA, 20 bp, synthetic construct
  source 1..20: mol_type = other DNA
gtgtctggagccagtgtgag

SEQ ID NO: 301137 - DNA, 20 bp, synthetic construct
  source 1..20: mol_type = other DNA
tgtgtctggagccagtgtga

SEQ ID NO: 301138 - DNA, 20 bp, synthetic construct
  source 1..20: mol_type = other DNA
gtgtgtctggagccagtgtg

SEQ ID NO: 301139 - DNA, 20 bp, synthetic construct
  source 1..20: mol_type = other DNA
tgtgtgtctggagccagtgt

SEQ ID NO: 301140 - DNA, 20 bp, synthetic construct
  source 1..20: mol_type = other DNA
ctgtgtgtctggagccagtg

SEQ ID NO: 301141 - DNA, 20 bp, synthetic construct
  source 1..20: mol_type = other DNA
gctgtgtgtctggagccagt

SEQ ID NO: 301142 - DNA, 20 bp, synthetic construct
  source 1..20: mol_type = other DNA
ggctgtgtgtctggagccag

SEQ ID NO: 301143 - DNA, 20 bp, synthetic construct
  source 1..20: mol_type = other DNA
aggctgtgtgtctggagcca

SEQ ID NO: 301144 - DNA, 20 bp, synthetic construct
  source 1..20: mol_type = other DNA
caggctgtgtgtctggagcc

SEQ ID NO: 301145 - DNA, 20 bp, synthetic construct
  source 1..20: mol_type = other DNA
acaggctgtgtgtctggagc

SEQ ID NO: 301146 - DNA, 20 bp, synthetic construct
  source 1..20: mol_type = other DNA
cacaggctgtgtgtctggag

SEQ ID NO: 301147 - DNA, 20 bp, synthetic construct
  source 1..20: mol_type = other DNA
gcacaggctgtgtgtctgga

SEQ ID NO: 301148 - DNA, 20 bp, synthetic construct
  source 1..20: mol_type = other DNA
agcacaggctgtgtgtctgg

SEQ ID NO: 301149 - DNA, 20 bp, synthetic construct
  source 1..20: mol_type = other DNA
aagcacaggctgtgtgtctg

SEQ ID NO: 301150 - DNA, 20 bp, synthetic construct
  source 1..20: mol_type = other DNA
aaagcacaggctgtgtgtct

SEQ ID NO: 301151 - DNA, 20 bp, synthetic construct
  source 1..20: mol_type = other DNA
aaaagcacaggctgtgtgtc

SEQ ID NO: 301152 - DNA, 20 bp, synthetic construct
  source 1..20: mol_type = other DNA
caaaagcacaggctgtgtgt

SEQ ID NO: 301153 - DNA, 20 bp, synthetic construct
  source 1..20: mol_type = other DNA
ccaaaagcacaggctgtgtg

SEQ ID NO: 301154 - DNA, 20 bp, synthetic construct
  source 1..20: mol_type = other DNA
tccaaaagcacaggctgtgt

SEQ ID NO: 301155 - DNA, 20 bp, synthetic construct
  source 1..20: mol_type = other DNA
ctccaaaagcacaggctgtg

SEQ ID NO: 301156 - DNA, 20 bp, synthetic construct
  source 1..20: mol_type = other DNA
gctccaaaagcacaggctgt

SEQ ID NO: 301157 - DNA, 20 bp, synthetic construct
  source 1..20: mol_type = other DNA
agctccaaaagcacaggctg

SEQ ID NO: 301158 - DNA, 20 bp, synthetic construct
  source 1..20: mol_type = other DNA
cagctccaaaagcacaggct

SEQ ID NO: 301159 - DNA, 20 bp, synthetic construct
  source 1..20: mol_type = other DNA
tcagctccaaaagcacaggc

SEQ ID NO: 301160 - DNA, 20 bp, synthetic construct
  source 1..20: mol_type = other DNA
ctcagctccaaaagcacagg

SEQ ID NO: 301161 - DNA, 20 bp, synthetic construct
  source 1..20: mol_type = other DNA
tctcagctccaaaagcacag

SEQ ID NO: 301162 - DNA, 20 bp, synthetic construct
  source 1..20: mol_type = other DNA
atctcagctccaaaagcaca

SEQ ID NO: 301163 - DNA, 20 bp, synthetic construct
  source 1..20: mol_type = other DNA
gatctcagctccaaaagcac

SEQ ID NO: 301164 - DNA, 20 bp, synthetic construct
  source 1..20: mol_type = other DNA
tgatctcagctccaaaagca

SEQ ID NO: 301165 - DNA, 20 bp, synthetic construct
  source 1..20: mol_type = other DNA
gtgatctcagctccaaaagc

SEQ ID NO: 301166 - DNA, 20 bp, synthetic construct
  source 1..20: mol_type = other DNA
agtgatctcagctccaaaag

SEQ ID NO: 301167 - DNA, 20 bp, synthetic construct
  source 1..20: mol_type = other DNA
gagtgatctcagctccaaaa

SEQ ID NO: 301168 - DNA, 20 bp, synthetic construct
  source 1..20: mol_type = other DNA
cgagtgatctcagctccaaa

SEQ ID NO: 301169 - DNA, 20 bp, synthetic construct
  source 1..20: mol_type = other DNA
gcgagtgatctcagctccaa

SEQ ID NO: 301170 - DNA, 20 bp, synthetic construct
  source 1..20: mol_type = other DNA
agcgagtgatctcagctcca

SEQ ID NO: 301171 - DNA, 20 bp, synthetic construct
  source 1..20: mol_type = other DNA
aagcgagtgatctcagctcc

SEQ ID NO: 301172 - DNA, 20 bp, synthetic construct
  source 1..20: mol_type = other DNA
gaagcgagtgatctcagctc

SEQ ID NO: 301173 - DNA, 20 bp, synthetic construct
  source 1..20: mol_type = other DNA
tgaagcgagtgatctcagct

SEQ ID NO: 301174 - DNA, 20 bp, synthetic construct
  source 1..20: mol_type = other DNA
gtgaagcgagtgatctcagc

SEQ ID NO: 301175 - DNA, 20 bp, synthetic construct
  source 1..20: mol_type = other DNA
ggtgaagcgagtgatctcag

SEQ ID NO: 301176 - DNA, 20 bp, synthetic construct
  source 1..20: mol_type = other DNA
gggtgaagcgagtgatctca

SEQ ID NO: 301177 - DNA, 20 bp, synthetic construct
  source 1..20: mol_type = other DNA
agggtgaagcgagtgatctc

SEQ ID NO: 301178 - DNA, 20 bp, synthetic construct
  source 1..20: mol_type = other DNA
gagggtgaagcgagtgatct

SEQ ID NO: 301179 - DNA, 20 bp, synthetic construct
  source 1..20: mol_type = other DNA
ggagggtgaagcgagtgatc

SEQ ID NO: 301180 - DNA, 20 bp, synthetic construct
  source 1..20: mol_type = other DNA
aggagggtgaagcgagtgat

SEQ ID NO: 301181 - DNA, 20 bp, synthetic construct
  source 1..20: mol_type = other DNA
gaggagggtgaagcgagtga

SEQ ID NO: 301182 - DNA, 20 bp, synthetic construct
  source 1..20: mol_type = other DNA
tgaggagggtgaagcgagtg

SEQ ID NO: 301183 - DNA, 20 bp, synthetic construct
  source 1..20: mol_type = other DNA
atgaggagggtgaagcgagt

SEQ ID NO: 301184 - DNA, 20 bp, synthetic construct
  source 1..20: mol_type = other DNA
gatgaggagggtgaagcgag

SEQ ID NO: 301185 - DNA, 20 bp, synthetic construct
  source 1..20: mol_type = other DNA
agatgaggagggtgaagcga

SEQ ID NO: 301186 - DNA, 20 bp, synthetic construct
  source 1..20: mol_type = other DNA
aagatgaggagggtgaagcg

SEQ ID NO: 301187 - DNA, 20 bp, synthetic construct
  source 1..20: mol_type = other DNA
aaagatgaggagggtgaagc

SEQ ID NO: 301188 - DNA, 20 bp, synthetic construct
  source 1..20: mol_type = other DNA
caaagatgaggagggtgaag

SEQ ID NO: 301189 - DNA, 20 bp, synthetic construct
  source 1..20: mol_type = other DNA
acaaagatgaggagggtgaa

SEQ ID NO: 301190 - DNA, 20 bp, synthetic construct
  source 1..20: mol_type = other DNA
aacaaagatgaggagggtga

SEQ ID NO: 301191 - DNA, 20 bp, synthetic construct
  source 1..20: mol_type = other DNA
gaacaaagatgaggagggtg

SEQ ID NO: 301192 - DNA, 20 bp, synthetic construct
  source 1..20: mol_type = other DNA
agaacaaagatgaggagggt

SEQ ID NO: 301193 - DNA, 20 bp, synthetic construct
  source 1..20: mol_type = other DNA
gagaacaaagatgaggaggg

SEQ ID NO: 301194 - DNA, 20 bp, synthetic construct
  source 1..20: mol_type = other DNA
ggagaacaaagatgaggagg

SEQ ID NO: 301195 - DNA, 20 bp, synthetic construct
  source 1..20: mol_type = other DNA
tggagaacaaagatgaggag

SEQ ID NO: 301196 - DNA, 20 bp, synthetic construct
  source 1..20: mol_type = other DNA
ttggagaacaaagatgagga

SEQ ID NO: 301197 - DNA, 20 bp, synthetic construct
  source 1..20: mol_type = other DNA
cttggagaacaaagatgagg

SEQ ID NO: 301198 - DNA, 20 bp, synthetic construct
  source 1..20: mol_type = other DNA
acttggagaacaaagatgag

SEQ ID NO: 301199 - DNA, 20 bp, synthetic construct
  source 1..20: mol_type = other DNA
tacttggagaacaaagatga

SEQ ID NO: 301200 - DNA, 20 bp, synthetic construct
  source 1..20: mol_type = other DNA
ttacttggagaacaaagatg

SEQ ID NO: 301201 - DNA, 20 bp, synthetic construct
  source 1..20: mol_type = other DNA
tttacttggagaacaaagat

SEQ ID NO: 301202 - DNA, 20 bp, synthetic construct
  source 1..20: mol_type = other DNA
ctttacttggagaacaaaga

SEQ ID NO: 301203 - DNA, 20 bp, synthetic construct
  source 1..20: mol_type = other DNA
gctttacttggagaacaaag

SEQ ID NO: 301204 - DNA, 20 bp, synthetic construct
  source 1..20: mol_type = other DNA
ggctttacttggagaacaaa

SEQ ID NO: 301205 - DNA, 20 bp, synthetic construct
  source 1..20: mol_type = other DNA
tggctttacttggagaacaa

SEQ ID NO: 301206 - DNA, 20 bp, synthetic construct
  source 1..20: mol_type = other DNA
gtggctttacttggagaaca

SEQ ID NO: 301207 - DNA, 20 bp, synthetic construct
  source 1..20: mol_type = other DNA
cgtggctttacttggagaac

SEQ ID NO: 301208 - DNA, 20 bp, synthetic construct
  source 1..20: mol_type = other DNA
tcgtggctttacttggagaa

SEQ ID NO: 301209 - DNA, 20 bp, synthetic construct
  source 1..20: mol_type = other DNA
ctcgtggctttacttggaga

SEQ ID NO: 301210 - DNA, 20 bp, synthetic construct
  source 1..20: mol_type = other DNA
cctcgtggctttacttggag

SEQ ID NO: 301211 - DNA, 20 bp, synthetic construct
  source 1..20: mol_type = other DNA
acctcgtggctttacttgga

SEQ ID NO: 301212 - DNA, 20 bp, synthetic construct
  source 1..20: mol_type = other DNA
gacctcgtggctttacttgg

SEQ ID NO: 301213 - DNA, 20 bp, synthetic construct
  source 1..20: mol_type = other DNA
cgacctcgtggctttacttg

SEQ ID NO: 301214 - DNA, 20 bp, synthetic construct
  source 1..20: mol_type = other DNA
ccgacctcgtggctttactt

SEQ ID NO: 301215 - DNA, 20 bp, synthetic construct
  source 1..20: mol_type = other DNA
cccgacctcgtggctttact

SEQ ID NO: 301216 - DNA, 20 bp, synthetic construct
  source 1..20: mol_type = other DNA
ccccgacctcgtggctttac

SEQ ID NO: 301217 - DNA, 20 bp, synthetic construct
  source 1..20: mol_type = other DNA
gccccgacctcgtggcttta

SEQ ID NO: 301218 - DNA, 20 bp, synthetic construct
  source 1..20: mol_type = other DNA
cgccccgacctcgtggcttt

SEQ ID NO: 301219 - DNA, 20 bp, synthetic construct
  source 1..20: mol_type = other DNA
tcgccccgacctcgtggctt

SEQ ID NO: 301220 - DNA, 20 bp, synthetic construct
  source 1..20: mol_type = other DNA
ctcgccccgacctcgtggct

SEQ ID NO: 301221 - DNA, 20 bp, synthetic construct
  source 1..20: mol_type = other DNA
cctcgccccgacctcgtggc

SEQ ID NO: 301222 - DNA, 20 bp, synthetic construct
  source 1..20: mol_type = other DNA
ccctcgccccgacctcgtgg

SEQ ID NO: 301223 - DNA, 20 bp, synthetic construct
  source 1..20: mol_type = other DNA
gccctcgccccgacctcgtg

SEQ ID NO: 301224 - DNA, 20 bp, synthetic construct
  source 1..20: mol_type = other DNA
tgccctcgccccgacctcgt

SEQ ID NO: 301225 - DNA, 20 bp, synthetic construct
  source 1..20: mol_type = other DNA
ctgccctcgccccgacctcg

SEQ ID NO: 301226 - DNA, 20 bp, synthetic construct
  source 1..20: mol_type = other DNA
tctgccctcgccccgacctc

SEQ ID NO: 301227 - DNA, 20 bp, synthetic construct
  source 1..20: mol_type = other DNA
ctctgccctcgccccgacct

SEQ ID NO: 301228 - DNA, 20 bp, synthetic construct
  source 1..20: mol_type = other DNA
cctctgccctcgccccgacc

SEQ ID NO: 301229 - DNA, 20 bp, synthetic construct
  source 1..20: mol_type = other DNA
acctctgccctcgccccgac

SEQ ID NO: 301230 - DNA, 20 bp, synthetic construct
  source 1..20: mol_type = other DNA
cacctctgccctcgccccga

SEQ ID NO: 301231 - DNA, 20 bp, synthetic construct
  source 1..20: mol_type = other DNA
tcacctctgccctcgccccg

SEQ ID NO: 301232 - DNA, 20 bp, synthetic construct
  source 1..20: mol_type = other DNA
atcacctctgccctcgcccc

SEQ ID NO: 301233 - DNA, 20 bp, synthetic construct
  source 1..20: mol_type = other DNA
gatcacctctgccctcgccc

SEQ ID NO: 301234 - DNA, 20 bp, synthetic construct
  source 1..20: mol_type = other DNA
tgatcacctctgccctcgcc

SEQ ID NO: 301235 - DNA, 20 bp, synthetic construct
  source 1..20: mol_type = other DNA
gtgatcacctctgccctcgc

SEQ ID NO: 301236 - DNA, 20 bp, synthetic construct
  source 1..20: mol_type = other DNA
ggtgatcacctctgccctcg

SEQ ID NO: 301237 - DNA, 20 bp, synthetic construct
  source 1..20: mol_type = other DNA
aggtgatcacctctgccctc

SEQ ID NO: 301238 - DNA, 20 bp, synthetic construct
  source 1..20: mol_type = other DNA
caggtgatcacctctgccct

SEQ ID NO: 301239 - DNA, 20 bp, synthetic construct
  source 1..20: mol_type = other DNA
gcaggtgatcacctctgccc

SEQ ID NO: 301240 - DNA, 20 bp, synthetic construct
  source 1..20: mol_type = other DNA
cgcaggtgatcacctctgcc

SEQ ID NO: 301241 - DNA, 20 bp, synthetic construct
  source 1..20: mol_type = other DNA
acgcaggtgatcacctctgc

SEQ ID NO: 301242 - DNA, 20 bp, synthetic construct
  source 1..20: mol_type = other DNA
cacgcaggtgatcacctctg

SEQ ID NO: 301243 - DNA, 20 bp, synthetic construct
  source 1..20: mol_type = other DNA
acacgcaggtgatcacctct

SEQ ID NO: 301244 - DNA, 20 bp, synthetic construct
  source 1..20: mol_type = other DNA
gacacgcaggtgatcacctc

SEQ ID NO: 301245 - DNA, 20 bp, synthetic construct
  source 1..20: mol_type = other DNA
ggacacgcaggtgatcacct

SEQ ID NO: 301246 - DNA, 20 bp, synthetic construct
  source 1..20: mol_type = other DNA
gggacacgcaggtgatcacc

SEQ ID NO: 301247 - DNA, 20 bp, synthetic construct
  source 1..20: mol_type = other DNA
tgggacacgcaggtgatcac

SEQ ID NO: 301248 - DNA, 20 bp, synthetic construct
  source 1..20: mol_type = other DNA
atgggacacgcaggtgatca

SEQ ID NO: 301249 - DNA, 20 bp, synthetic construct
  source 1..20: mol_type = other DNA
gatgggacacgcaggtgatc

SEQ ID NO: 301250 - DNA, 20 bp, synthetic construct
  source 1..20: mol_type = other DNA
agatgggacacgcaggtgat

SEQ ID NO: 301251 - DNA, 20 bp, synthetic construct
  source 1..20: mol_type = other DNA
tagatgggacacgcaggtga

SEQ ID NO: 301252 - DNA, 20 bp, synthetic construct
  source 1..20: mol_type = other DNA
gtagatgggacacgcaggtg

SEQ ID NO: 301253 - DNA, 20 bp, synthetic construct
  source 1..20: mol_type = other DNA
tgtagatgggacacgcaggt

SEQ ID NO: 301254 - DNA, 20 bp, synthetic construct
  source 1..20: mol_type = other DNA
ctgtagatgggacacgcagg

SEQ ID NO: 301255 - DNA, 20 bp, synthetic construct
  source 1..20: mol_type = other DNA
tctgtagatgggacacgcag

SEQ ID NO: 301256 - DNA, 20 bp, synthetic construct
  source 1..20: mol_type = other DNA
gtctgtagatgggacacgca

SEQ ID NO: 301257 - DNA, 20 bp, synthetic construct
  source 1..20: mol_type = other DNA
ggtctgtagatgggacacgc

SEQ ID NO: 301258 - DNA, 20 bp, synthetic construct
  source 1..20: mol_type = other DNA
aggtctgtagatgggacacg

SEQ ID NO: 301259 - DNA, 20 bp, synthetic construct
  source 1..20: mol_type = other DNA
caggtctgtagatgggacac

SEQ ID NO: 301260 - DNA, 20 bp, synthetic construct
  source 1..20: mol_type = other DNA
gcaggtctgtagatgggaca

SEQ ID NO: 301261 - DNA, 20 bp, synthetic construct
  source 1..20: mol_type = other DNA
tgcaggtctgtagatgggac

SEQ ID NO: 301262 - DNA, 20 bp, synthetic construct
  source 1..20: mol_type = other DNA
ctgcaggtctgtagatggga

SEQ ID NO: 301263 - DNA, 20 bp, synthetic construct
  source 1..20: mol_type = other DNA
gctgcaggtctgtagatggg

SEQ ID NO: 301264 - DNA, 20 bp, synthetic construct
  source 1..20: mol_type = other DNA
agctgcaggtctgtagatgg

SEQ ID NO: 301265 - DNA, 20 bp, synthetic construct
  source 1..20: mol_type = other DNA
aagctgcaggtctgtagatg

SEQ ID NO: 301266 - DNA, 20 bp, synthetic construct
  source 1..20: mol_type = other DNA
gaagctgcaggtctgtagat

SEQ ID NO: 301267 - DNA, 20 bp, synthetic construct
  source 1..20: mol_type = other DNA
tgaagctgcaggtctgtaga

SEQ ID NO: 301268 - DNA, 20 bp, synthetic construct
  source 1..20: mol_type = other DNA
atgaagctgcaggtctgtag

SEQ ID NO: 301269 - DNA, 20 bp, synthetic construct
  source 1..20: mol_type = other DNA
tatgaagctgcaggtctgta

SEQ ID NO: 301270 - DNA, 20 bp, synthetic construct
  source 1..20: mol_type = other DNA
ttatgaagctgcaggtctgt

SEQ ID NO: 301271 - DNA, 20 bp, synthetic construct
  source 1..20: mol_type = other DNA
tttatgaagctgcaggtctg

SEQ ID NO: 301272 - DNA, 20 bp, synthetic construct
  source 1..20: mol_type = other DNA
ttttatgaagctgcaggtct

SEQ ID NO: 301273 - DNA, 20 bp, synthetic construct
  source 1..20: mol_type = other DNA
gttttatgaagctgcaggtc

SEQ ID NO: 301274 - DNA, 20 bp, synthetic construct
  source 1..20: mol_type = other DNA
agttttatgaagctgcaggt

SEQ ID NO: 301275 - DNA, 20 bp, synthetic construct
  source 1..20: mol_type = other DNA
aagttttatgaagctgcagg

SEQ ID NO: 301276 - DNA, 20 bp, synthetic construct
  source 1..20: mol_type = other DNA
gaagttttatgaagctgcag

SEQ ID NO: 301277 - DNA, 20 bp, synthetic construct
  source 1..20: mol_type = other DNA
agaagttttatgaagctgca

SEQ ID NO: 301278 - DNA, 20 bp, synthetic construct
  source 1..20: mol_type = other DNA
cagaagttttatgaagctgc

SEQ ID NO: 301279 - DNA, 20 bp, synthetic construct
  source 1..20: mol_type = other DNA
tcagaagttttatgaagctg

SEQ ID NO: 301280 - DNA, 20 bp, synthetic construct
  source 1..20: mol_type = other DNA
atcagaagttttatgaagct

SEQ ID NO: 301281 - DNA, 20 bp, synthetic construct
  source 1..20: mol_type = other DNA
aatcagaagttttatgaagc

SEQ ID NO: 301282 - DNA, 20 bp, synthetic construct
  source 1..20: mol_type = other DNA
aaatcagaagttttatgaag

SEQ ID NO: 301283 - DNA, 20 bp, synthetic construct
  source 1..20: mol_type = other DNA
gaaatcagaagttttatgaa

SEQ ID NO: 301284 - DNA, 20 bp, synthetic construct
  source 1..20: mol_type = other DNA
agaaatcagaagttttatga

SEQ ID NO: 301285 - DNA, 20 bp, synthetic construct
  source 1..20: mol_type = other DNA
gagaaatcagaagttttatg

SEQ ID NO: 301286 - DNA, 20 bp, synthetic construct
  source 1..20: mol_type = other DNA
agagaaatcagaagttttat

SEQ ID NO: 301287 - DNA, 20 bp, synthetic construct
  source 1..20: mol_type = other DNA
aagagaaatcagaagtttta

SEQ ID NO: 301288 - DNA, 20 bp, synthetic construct
  source 1..20: mol_type = other DNA
gaagagaaatcagaagtttt

SEQ ID NO: 301289 - DNA, 20 bp, synthetic construct
  source 1..20: mol_type = other DNA
tgaagagaaatcagaagttt

SEQ ID NO: 301290 - DNA, 20 bp, synthetic construct
  source 1..20: mol_type = other DNA
ctgaagagaaatcagaagtt

SEQ ID NO: 301291 - DNA, 20 bp, synthetic construct
  source 1..20: mol_type = other DNA
gctgaagagaaatcagaagt

SEQ ID NO: 301292 - DNA, 20 bp, synthetic construct
  source 1..20: mol_type = other DNA
agctgaagagaaatcagaag

SEQ ID NO: 301293 - DNA, 20 bp, synthetic construct
  source 1..20: mol_type = other DNA
aagctgaagagaaatcagaa

SEQ ID NO: 301294 - DNA, 20 bp, synthetic construct
  source 1..20: mol_type = other DNA
aaagctgaagagaaatcaga

SEQ ID NO: 301295 - DNA, 20 bp, synthetic construct
  source 1..20: mol_type = other DNA
caaagctgaagagaaatcag

SEQ ID NO: 301296 - DNA, 20 bp, synthetic construct
  source 1..20: mol_type = other DNA
tcaaagctgaagagaaatca

SEQ ID NO: 301297 - DNA, 20 bp, synthetic construct
  source 1..20: mol_type = other DNA
ttcaaagctgaagagaaatc

SEQ ID NO: 301298 - DNA, 20 bp, synthetic construct
  source 1..20: mol_type = other DNA
tttcaaagctgaagagaaat

SEQ ID NO: 301299 - DNA, 20 bp, synthetic construct
  source 1..20: mol_type = other DNA
ttttcaaagctgaagagaaa

SEQ ID NO: 301300 - DNA, 20 bp, synthetic construct
  source 1..20: mol_type = other DNA
cttttcaaagctgaagagaa

SEQ ID NO: 301301 - DNA, 20 bp, synthetic construct
  source 1..20: mol_type = other DNA
ccttttcaaagctgaagaga

SEQ ID NO: 301302 - DNA, 20 bp, synthetic construct
  source 1..20: mol_type = other DNA
cccttttcaaagctgaagag

SEQ ID NO: 301303 - DNA, 20 bp, synthetic construct
  source 1..20: mol_type = other DNA
acccttttcaaagctgaaga

SEQ ID NO: 301304 - DNA, 20 bp, synthetic construct
  source 1..20: mol_type = other DNA
aacccttttcaaagctgaag

SEQ ID NO: 301305 - DNA, 20 bp, synthetic construct
  source 1..20: mol_type = other DNA
taacccttttcaaagctgaa

SEQ ID NO: 301306 - DNA, 20 bp, synthetic construct
  source 1..20: mol_type = other DNA
gtaacccttttcaaagctga

SEQ ID NO: 301307 - DNA, 20 bp, synthetic construct
  source 1..20: mol_type = other DNA
ggtaacccttttcaaagctg

SEQ ID NO: 301308 - DNA, 20 bp, synthetic construct
  source 1..20: mol_type = other DNA
gggtaacccttttcaaagct

SEQ ID NO: 301309 - DNA, 20 bp, synthetic construct
  source 1..20: mol_type = other DNA
agggtaacccttttcaaagc

SEQ ID NO: 301310 - DNA, 20 bp, synthetic construct
  source 1..20: mol_type = other DNA
cagggtaacccttttcaaag

SEQ ID NO: 301311 - DNA, 20 bp, synthetic construct
  source 1..20: mol_type = other DNA
ccagggtaacccttttcaaa

SEQ ID NO: 301312 - DNA, 20 bp, synthetic construct
  source 1..20: mol_type = other DNA
cccagggtaacccttttcaa

SEQ ID NO: 301313 - DNA, 20 bp, synthetic construct
  source 1..20: mol_type = other DNA
gcccagggtaacccttttca

SEQ ID NO: 301314 - DNA, 20 bp, synthetic construct
  source 1..20: mol_type = other DNA
tgcccagggtaacccttttc

SEQ ID NO: 301315 - DNA, 20 bp, synthetic construct
  source 1..20: mol_type = other DNA
gtgcccagggtaaccctttt

SEQ ID NO: 301316 - DNA, 20 bp, synthetic construct
  source 1..20: mol_type = other DNA
agtgcccagggtaacccttt

SEQ ID NO: 301317 - DNA, 20 bp, synthetic construct
  source 1..20: mol_type = other DNA
cagtgcccagggtaaccctt

SEQ ID NO: 301318 - DNA, 20 bp, synthetic construct
  source 1..20: mol_type = other DNA
ccagtgcccagggtaaccct

SEQ ID NO: 301319 - DNA, 20 bp, synthetic construct
  source 1..20: mol_type = other DNA
gccagtgcccagggtaaccc

SEQ ID NO: 301320 - DNA, 20 bp, synthetic construct
  source 1..20: mol_type = other DNA
ggccagtgcccagggtaacc

SEQ ID NO: 301321 - DNA, 20 bp, synthetic construct
  source 1..20: mol_type = other DNA
aggccagtgcccagggtaac

SEQ ID NO: 301322 - DNA, 20 bp, synthetic construct
  source 1..20: mol_type = other DNA
taggccagtgcccagggtaa

SEQ ID NO: 301323 - DNA, 20 bp, synthetic construct
  source 1..20: mol_type = other DNA
ctaggccagtgcccagggta

SEQ ID NO: 301324 - DNA, 20 bp, synthetic construct
  source 1..20: mol_type = other DNA
tctaggccagtgcccagggt

SEQ ID NO: 301325 - DNA, 20 bp, synthetic construct
  source 1..20: mol_type = other DNA
ctctaggccagtgcccaggg

SEQ ID NO: 301326 - DNA, 20 bp, synthetic construct
  source 1..20: mol_type = other DNA
gctctaggccagtgcccagg

SEQ ID NO: 301327 - DNA, 20 bp, synthetic construct
  source 1..20: mol_type = other DNA
ggctctaggccagtgcccag

SEQ ID NO: 301328 - DNA, 20 bp, synthetic construct
  source 1..20: mol_type = other DNA
aggctctaggccagtgccca

SEQ ID NO: 301329 - DNA, 20 bp, synthetic construct
  source 1..20: mol_type = other DNA
gaggctctaggccagtgccc

SEQ ID NO: 301330 - DNA, 20 bp, synthetic construct
  source 1..20: mol_type = other DNA
tgaggctctaggccagtgcc

SEQ ID NO: 301331 - DNA, 20 bp, synthetic construct
  source 1..20: mol_type = other DNA
gtgaggctctaggccagtgc

SEQ ID NO: 301332 - DNA, 20 bp, synthetic construct
  source 1..20: mol_type = other DNA
ggtgaggctctaggccagtg

SEQ ID NO: 301333 - DNA, 20 bp, synthetic construct
  source 1..20: mol_type = other DNA
aggtgaggctctaggccagt

SEQ ID NO: 301334 - DNA, 20 bp, synthetic construct
  source 1..20: mol_type = other DNA
gaggtgaggctctaggccag

SEQ ID NO: 301335 - DNA, 20 bp, synthetic construct
  source 1..20: mol_type = other DNA
ggaggtgaggctctaggcca

SEQ ID NO: 301336 - DNA, 20 bp, synthetic construct
  source 1..20: mol_type = other DNA
aggaggtgaggctctaggcc

SEQ ID NO: 301337 - DNA, 20 bp, synthetic construct
  source 1..20: mol_type = other DNA
taggaggtgaggctctaggc

SEQ ID NO: 301338 - DNA, 20 bp, synthetic construct
  source 1..20: mol_type = other DNA
ttaggaggtgaggctctagg

SEQ ID NO: 301339 - DNA, 20 bp, synthetic construct
  source 1..20: mol_type = other DNA
attaggaggtgaggctctag

SEQ ID NO: 301340 - DNA, 20 bp, synthetic construct
  source 1..20: mol_type = other DNA
tattaggaggtgaggctcta

SEQ ID NO: 301341 - DNA, 20 bp, synthetic construct
  source 1..20: mol_type = other DNA
ctattaggaggtgaggctct

SEQ ID NO: 301342 - DNA, 20 bp, synthetic construct
  source 1..20: mol_type = other DNA
tctattaggaggtgaggctc

SEQ ID NO: 301343 - DNA, 20 bp, synthetic construct
  source 1..20: mol_type = other DNA
gtctattaggaggtgaggct

SEQ ID NO: 301344 - DNA, 20 bp, synthetic construct
  source 1..20: mol_type = other DNA
agtctattaggaggtgaggc

SEQ ID NO: 301345 - DNA, 20 bp, synthetic construct
  source 1..20: mol_type = other DNA
aagtctattaggaggtgagg

SEQ ID NO: 301346 - DNA, 20 bp, synthetic construct
  source 1..20: mol_type = other DNA
taagtctattaggaggtgag

SEQ ID NO: 301347 - DNA, 20 bp, synthetic construct
  source 1..20: mol_type = other DNA
ctaagtctattaggaggtga

SEQ ID NO: 301348 - DNA, 20 bp, synthetic construct
  source 1..20: mol_type = other DNA
gctaagtctattaggaggtg

SEQ ID NO: 301349 - DNA, 20 bp, synthetic construct
  source 1..20: mol_type = other DNA
ggctaagtctattaggaggt

SEQ ID NO: 301350 - DNA, 20 bp, synthetic construct
  source 1..20: mol_type = other DNA
gggctaagtctattaggagg

SEQ ID NO: 301351 - DNA, 20 bp, synthetic construct
  source 1..20: mol_type = other DNA
ggggctaagtctattaggag

SEQ ID NO: 301352 - DNA, 20 bp, synthetic construct
  source 1..20: mol_type = other DNA
tggggctaagtctattagga

SEQ ID NO: 301353 - DNA, 20 bp, synthetic construct
  source 1..20: mol_type = other DNA
atggggctaagtctattagg

SEQ ID NO: 301354 - DNA, 20 bp, synthetic construct
  source 1..20: mol_type = other DNA
catggggctaagtctattag

SEQ ID NO: 301355 - DNA, 20 bp, synthetic construct
  source 1..20: mol_type = other DNA
tcatggggctaagtctatta

SEQ ID NO: 301356 - DNA, 20 bp, synthetic construct
  source 1..20: mol_type = other DNA
ctcatggggctaagtctatt

SEQ ID NO: 301357 - DNA, 20 bp, synthetic construct
  source 1..20: mol_type = other DNA
actcatggggctaagtctat

SEQ ID NO: 301358 - DNA, 20 bp, synthetic construct
  source 1..20: mol_type = other DNA
aactcatggggctaagtcta

SEQ ID NO: 301359 - DNA, 20 bp, synthetic construct
  source 1..20: mol_type = other DNA
aaactcatggggctaagtct

SEQ ID NO: 301360 - DNA, 20 bp, synthetic construct
  source 1..20: mol_type = other DNA
caaactcatggggctaagtc

SEQ ID NO: 301361 - DNA, 20 bp, synthetic construct
  source 1..20: mol_type = other DNA
gcaaactcatggggctaagt

SEQ ID NO: 301362 - DNA, 20 bp, synthetic construct
  source 1..20: mol_type = other DNA
ggcaaactcatggggctaag

SEQ ID NO: 301363 - DNA, 20 bp, synthetic construct
  source 1..20: mol_type = other DNA
tggcaaactcatggggctaa

SEQ ID NO: 301364 - DNA, 20 bp, synthetic construct
  source 1..20: mol_type = other DNA
atggcaaactcatggggcta

SEQ ID NO: 301365 - DNA, 20 bp, synthetic construct
  source 1..20: mol_type = other DNA
catggcaaactcatggggct

SEQ ID NO: 301366 - DNA, 20 bp, synthetic construct
  source 1..20: mol_type = other DNA
acatggcaaactcatggggc

SEQ ID NO: 301367 - DNA, 20 bp, synthetic construct
  source 1..20: mol_type = other DNA
aacatggcaaactcatgggg

SEQ ID NO: 301368 - DNA, 20 bp, synthetic construct
  source 1..20: mol_type = other DNA
caacatggcaaactcatggg

SEQ ID NO: 301369 - DNA, 20 bp, synthetic construct
  source 1..20: mol_type = other DNA
tcaacatggcaaactcatgg

SEQ ID NO: 301370 - DNA, 20 bp, synthetic construct
  source 1..20: mol_type = other DNA
ctcaacatggcaaactcatg

SEQ ID NO: 301371 - DNA, 20 bp, synthetic construct
  source 1..20: mol_type = other DNA
gctcaacatggcaaactcat

SEQ ID NO: 301372 - DNA, 20 bp, synthetic construct
  source 1..20: mol_type = other DNA
tgctcaacatggcaaactca

SEQ ID NO: 301373 - DNA, 20 bp, synthetic construct
  source 1..20: mol_type = other DNA
ctgctcaacatggcaaactc

SEQ ID NO: 301374 - DNA, 20 bp, synthetic construct
  source 1..20: mol_type = other DNA
cctgctcaacatggcaaact

SEQ ID NO: 301375 - DNA, 20 bp, synthetic construct
  source 1..20: mol_type = other DNA
tcctgctcaacatggcaaac

SEQ ID NO: 301376 - DNA, 20 bp, synthetic construct
  source 1..20: mol_type = other DNA
gtcctgctcaacatggcaaa

SEQ ID NO: 301377 - DNA, 20 bp, synthetic construct
  source 1..20: mol_type = other DNA
agtcctgctcaacatggcaa

SEQ ID NO: 301378 - DNA, 20 bp, synthetic construct
  source 1..20: mol_type = other DNA
tagtcctgctcaacatggca

SEQ ID NO: 301379 - DNA, 20 bp, synthetic construct
  source 1..20: mol_type = other DNA
atagtcctgctcaacatggc

SEQ ID NO: 301380 - DNA, 20 bp, synthetic construct
  source 1..20: mol_type = other DNA
aatagtcctgctcaacatgg

SEQ ID NO: 301381 - DNA, 20 bp, synthetic construct
  source 1..20: mol_type = other DNA
aaatagtcctgctcaacatg

SEQ ID NO: 301382 - DNA, 20 bp, synthetic construct
  source 1..20: mol_type = other DNA
gaaatagtcctgctcaacat

SEQ ID NO: 301383 - DNA, 20 bp, synthetic construct
  source 1..20: mol_type = other DNA
agaaatagtcctgctcaaca

SEQ ID NO: 301384 - DNA, 20 bp, synthetic construct
  source 1..20: mol_type = other DNA
cagaaatagtcctgctcaac

SEQ ID NO: 301385 - DNA, 20 bp, synthetic construct
  source 1..20: mol_type = other DNA
ccagaaatagtcctgctcaa

SEQ ID NO: 301386 - DNA, 20 bp, synthetic construct
  source 1..20: mol_type = other DNA
gccagaaatagtcctgctca

SEQ ID NO: 301387 - DNA, 20 bp, synthetic construct
  source 1..20: mol_type = other DNA
tgccagaaatagtcctgctc

SEQ ID NO: 301388 - DNA, 20 bp, synthetic construct
  source 1..20: mol_type = other DNA
gtgccagaaatagtcctgct

SEQ ID NO: 301389 - DNA, 20 bp, synthetic construct
  source 1..20: mol_type = other DNA
agtgccagaaatagtcctgc

SEQ ID NO: 301390 - DNA, 20 bp, synthetic construct
  source 1..20: mol_type = other DNA
aagtgccagaaatagtcctg

SEQ ID NO: 301391 - DNA, 20 bp, synthetic construct
  source 1..20: mol_type = other DNA
caagtgccagaaatagtcct

SEQ ID NO: 301392 - DNA, 20 bp, synthetic construct
  source 1..20: mol_type = other DNA
gcaagtgccagaaatagtcc

SEQ ID NO: 301393 - DNA, 20 bp, synthetic construct
  source 1..20: mol_type = other DNA
tgcaagtgccagaaatagtc

SEQ ID NO: 301394 - DNA, 20 bp, synthetic construct
  source 1..20: mol_type = other DNA
ttgcaagtgccagaaatagt

SEQ ID NO: 301395 - DNA, 20 bp, synthetic construct
  source 1..20: mol_type = other DNA
cttgcaagtgccagaaatag

SEQ ID NO: 301396 - DNA, 20 bp, synthetic construct
  source 1..20: mol_type = other DNA
acttgcaagtgccagaaata

SEQ ID NO: 301397 - DNA, 20 bp, synthetic construct
  source 1..20: mol_type = other DNA
gacttgcaagtgccagaaat

SEQ ID NO: 301398 - DNA, 20 bp, synthetic construct
  source 1..20: mol_type = other DNA
ggacttgcaagtgccagaaa

SEQ ID NO: 301399 - DNA, 20 bp, synthetic construct
  source 1..20: mol_type = other DNA
gggacttgcaagtgccagaa

SEQ ID NO: 301400 - DNA, 20 bp, synthetic construct
  source 1..20: mol_type = other DNA
tgggacttgcaagtgccaga

SEQ ID NO: 301401 - DNA, 20 bp, synthetic construct
  source 1..20: mol_type = other DNA
atgggacttgcaagtgccag

SEQ ID NO: 301402 - DNA, 20 bp, synthetic construct
  source 1..20: mol_type = other DNA
catgggacttgcaagtgcca

SEQ ID NO: 301403 - DNA, 20 bp, synthetic construct
  source 1..20: mol_type = other DNA
tcatgggacttgcaagtgcc

SEQ ID NO: 301404 - DNA, 20 bp, synthetic construct
  source 1..20: mol_type = other DNA
atcatgggacttgcaagtgc

SEQ ID NO: 301405 - DNA, 20 bp, synthetic construct
  source 1..20: mol_type = other DNA
aatcatgggacttgcaagtg

SEQ ID NO: 301406 - DNA, 20 bp, synthetic construct
  source 1..20: mol_type = other DNA
aaatcatgggacttgcaagt

SEQ ID NO: 301407 - DNA, 20 bp, synthetic construct
  source 1..20: mol_type = other DNA
gaaatcatgggacttgcaag

SEQ ID NO: 301408 - DNA, 20 bp, synthetic construct
  source 1..20: mol_type = other DNA
agaaatcatgggacttgcaa

SEQ ID NO: 301409 - DNA, 20 bp, synthetic construct
  source 1..20: mol_type = other DNA
aagaaatcatgggacttgca

SEQ ID NO: 301410 - DNA, 20 bp, synthetic construct
  source 1..20: mol_type = other DNA
gaagaaatcatgggacttgc

SEQ ID NO: 301411 - DNA, 20 bp, synthetic construct
  source 1..20: mol_type = other DNA
cgaagaaatcatgggacttg

SEQ ID NO: 301412 - DNA, 20 bp, synthetic construct
  source 1..20: mol_type = other DNA
ccgaagaaatcatgggactt

SEQ ID NO: 301413 - DNA, 20 bp, synthetic construct
  source 1..20: mol_type = other DNA
accgaagaaatcatgggact

SEQ ID NO: 301414 - DNA, 20 bp, synthetic construct
  source 1..20: mol_type = other DNA
taccgaagaaatcatgggac

SEQ ID NO: 301415 - DNA, 20 bp, synthetic construct
  source 1..20: mol_type = other DNA
ttaccgaagaaatcatggga

SEQ ID NO: 301416 - DNA, 20 bp, synthetic construct
  source 1..20: mol_type = other DNA
attaccgaagaaatcatggg

SEQ ID NO: 301417 - DNA, 20 bp, synthetic construct
  source 1..20: mol_type = other DNA
aattaccgaagaaatcatgg

SEQ ID NO: 301418 - DNA, 20 bp, synthetic construct
  source 1..20: mol_type = other DNA
gaattaccgaagaaatcatg

SEQ ID NO: 301419 - DNA, 20 bp, synthetic construct
  source 1..20: mol_type = other DNA
agaattaccgaagaaatcat

SEQ ID NO: 301420 - DNA, 20 bp, synthetic construct
  source 1..20: mol_type = other DNA
cagaattaccgaagaaatca

SEQ ID NO: 301421 - DNA, 20 bp, synthetic construct
  source 1..20: mol_type = other DNA
tcagaattaccgaagaaatc

SEQ ID NO: 301422 - DNA, 20 bp, synthetic construct
  source 1..20: mol_type = other DNA
ctcagaattaccgaagaaat

SEQ ID NO: 301423 - DNA, 20 bp, synthetic construct
  source 1..20: mol_type = other DNA
cctcagaattaccgaagaaa

SEQ ID NO: 301424 - DNA, 20 bp, synthetic construct
  source 1..20: mol_type = other DNA
ccctcagaattaccgaagaa

SEQ ID NO: 301425 - DNA, 20 bp, synthetic construct
  source 1..20: mol_type = other DNA
accctcagaattaccgaaga

SEQ ID NO: 301426 - DNA, 20 bp, synthetic construct
  source 1..20: mol_type = other DNA
caccctcagaattaccgaag

SEQ ID NO: 301427 - DNA, 20 bp, synthetic construct
  source 1..20: mol_type = other DNA
ccaccctcagaattaccgaa

SEQ ID NO: 301428 - DNA, 20 bp, synthetic construct
  source 1..20: mol_type = other DNA
cccaccctcagaattaccga

SEQ ID NO: 301429 - DNA, 20 bp, synthetic construct
  source 1..20: mol_type = other DNA
ccccaccctcagaattaccg

SEQ ID NO: 301430 - DNA, 20 bp, synthetic construct
  source 1..20: mol_type = other DNA
cccccaccctcagaattacc

SEQ ID NO: 301431 - DNA, 20 bp, synthetic construct
  source 1..20: mol_type = other DNA
ccccccaccctcagaattac

SEQ ID NO: 301432 - DNA, 20 bp, synthetic construct
  source 1..20: mol_type = other DNA
tccccccaccctcagaatta

SEQ ID NO: 301433 - DNA, 20 bp, synthetic construct
  source 1..20: mol_type = other DNA
ctccccccaccctcagaatt

SEQ ID NO: 301434 - DNA, 20 bp, synthetic construct
  source 1..20: mol_type = other DNA
cctccccccaccctcagaat

SEQ ID NO: 301435 - DNA, 20 bp, synthetic construct
  source 1..20: mol_type = other DNA
ccctccccccaccctcagaa

SEQ ID NO: 301436 - DNA, 20 bp, synthetic construct
  source 1..20: mol_type = other DNA
tccctccccccaccctcaga

SEQ ID NO: 301437 - DNA, 20 bp, synthetic construct
  source 1..20: mol_type = other DNA
gtccctccccccaccctcag

SEQ ID NO: 301438 - DNA, 20 bp, synthetic construct
  source 1..20: mol_type = other DNA
tgtccctccccccaccctca

SEQ ID NO: 301439 - DNA, 20 bp, synthetic construct
  source 1..20: mol_type = other DNA
atgtccctccccccaccctc

SEQ ID NO: 301440 - DNA, 20 bp, synthetic construct
  source 1..20: mol_type = other DNA
catgtccctccccccaccct

SEQ ID NO: 301441 - DNA, 20 bp, synthetic construct
  source 1..20: mol_type = other DNA
tcatgtccctccccccaccc

SEQ ID NO: 301442 - DNA, 20 bp, synthetic construct
  source 1..20: mol_type = other DNA
ttcatgtccctccccccacc

SEQ ID NO: 301443 - DNA, 20 bp, synthetic construct
  source 1..20: mol_type = other DNA
tttcatgtccctccccccac

SEQ ID NO: 301444 - DNA, 20 bp, synthetic construct
  source 1..20: mol_type = other DNA
atttcatgtccctcccccca

SEQ ID NO: 301445 - DNA, 20 bp, synthetic construct
  source 1..20: mol_type = other DNA
gatttcatgtccctcccccc

SEQ ID NO: 301446 - DNA, 20 bp, synthetic construct
  source 1..20: mol_type = other DNA
tgatttcatgtccctccccc

SEQ ID NO: 301447 - DNA, 20 bp, synthetic construct
  source 1..20: mol_type = other DNA
atgatttcatgtccctcccc

SEQ ID NO: 301448 - DNA, 20 bp, synthetic construct
  source 1..20: mol_type = other DNA
gatgatttcatgtccctccc

SEQ ID NO: 301449 - DNA, 20 bp, synthetic construct
  source 1..20: mol_type = other DNA
agatgatttcatgtccctcc

SEQ ID NO: 301450 - DNA, 20 bp, synthetic construct
  source 1..20: mol_type = other DNA
aagatgatttcatgtccctc

SEQ ID NO: 301451 - DNA, 20 bp, synthetic construct
  source 1..20: mol_type = other DNA
taagatgatttcatgtccct

SEQ ID NO: 301452 - DNA, 20 bp, synthetic construct
  source 1..20: mol_type = other DNA
ctaagatgatttcatgtccc

SEQ ID NO: 301453 - DNA, 20 bp, synthetic construct
  source 1..20: mol_type = other DNA
gctaagatgatttcatgtcc

SEQ ID NO: 301454 - DNA, 20 bp, synthetic construct
  source 1..20: mol_type = other DNA
agctaagatgatttcatgtc

SEQ ID NO: 301455 - DNA, 20 bp, synthetic construct
  source 1..20: mol_type = other DNA
aagctaagatgatttcatgt

SEQ ID NO: 301456 - DNA, 20 bp, synthetic construct
  source 1..20: mol_type = other DNA
taagctaagatgatttcatg

SEQ ID NO: 301457 - DNA, 20 bp, synthetic construct
  source 1..20: mol_type = other DNA
ctaagctaagatgatttcat

SEQ ID NO: 301458 - DNA, 20 bp, synthetic construct
  source 1..20: mol_type = other DNA
gctaagctaagatgatttca

SEQ ID NO: 301459 - DNA, 20 bp, synthetic construct
  source 1..20: mol_type = other DNA
agctaagctaagatgatttc

SEQ ID NO: 301460 - DNA, 20 bp, synthetic construct
  source 1..20: mol_type = other DNA
aagctaagctaagatgattt

SEQ ID NO: 301461 - DNA, 20 bp, synthetic construct
  source 1..20: mol_type = other DNA
aaagctaagctaagatgatt

SEQ ID NO: 301462 - DNA, 20 bp, synthetic construct
  source 1..20: mol_type = other DNA
gaaagctaagctaagatgat

SEQ ID NO: 301463 - DNA, 20 bp, synthetic construct
  source 1..20: mol_type = other DNA
agaaagctaagctaagatga

SEQ ID NO: 301464 - DNA, 20 bp, synthetic construct
  source 1..20: mol_type = other DNA
cagaaagctaagctaagatg

SEQ ID NO: 301465 - DNA, 20 bp, synthetic construct
  source 1..20: mol_type = other DNA
acagaaagctaagctaagat

SEQ ID NO: 301466 - DNA, 20 bp, synthetic construct
  source 1..20: mol_type = other DNA
gacagaaagctaagctaaga

SEQ ID NO: 301467 - DNA, 20 bp, synthetic construct
  source 1..20: mol_type = other DNA
agacagaaagctaagctaag

SEQ ID NO: 301468 - DNA, 20 bp, synthetic construct
  source 1..20: mol_type = other DNA
cagacagaaagctaagctaa

SEQ ID NO: 301469 - DNA, 20 bp, synthetic construct
  source 1..20: mol_type = other DNA
acagacagaaagctaagcta

SEQ ID NO: 301470 - DNA, 20 bp, synthetic construct
  source 1..20: mol_type = other DNA
cacagacagaaagctaagct

SEQ ID NO: 301471 - DNA, 20 bp, synthetic construct
  source 1..20: mol_type = other DNA
tcacagacagaaagctaagc

SEQ ID NO: 301472 - DNA, 20 bp, synthetic construct
  source 1..20: mol_type = other DNA
ttcacagacagaaagctaag

SEQ ID NO: 301473 - DNA, 20 bp, synthetic construct
  source 1..20: mol_type = other DNA
attcacagacagaaagctaa

SEQ ID NO: 301474 - DNA, 20 bp, synthetic construct
  source 1..20: mol_type = other DNA
cattcacagacagaaagcta

SEQ ID NO: 301475 - DNA, 20 bp, synthetic construct
  source 1..20: mol_type = other DNA
acattcacagacagaaagct

SEQ ID NO: 301476 - DNA, 20 bp, synthetic construct
  source 1..20: mol_type = other DNA
gacattcacagacagaaagc

SEQ ID NO: 301477 - DNA, 20 bp, synthetic construct
  source 1..20: mol_type = other DNA
agacattcacagacagaaag

SEQ ID NO: 301478 - DNA, 20 bp, synthetic construct
  source 1..20: mol_type = other DNA
tagacattcacagacagaaa

SEQ ID NO: 301479 - DNA, 20 bp, synthetic construct
  source 1..20: mol_type = other DNA
atagacattcacagacagaa

SEQ ID NO: 301480 - DNA, 20 bp, synthetic construct
  source 1..20: mol_type = other DNA
tatagacattcacagacaga

SEQ ID NO: 301481 - DNA, 20 bp, synthetic construct
  source 1..20: mol_type = other DNA
atatagacattcacagacag

SEQ ID NO: 301482 - DNA, 20 bp, synthetic construct
  source 1..20: mol_type = other DNA
tatatagacattcacagaca

SEQ ID NO: 301483 - DNA, 20 bp, synthetic construct
  source 1..20: mol_type = other DNA
ctatatagacattcacagac

SEQ ID NO: 301484 - DNA, 20 bp, synthetic construct
  source 1..20: mol_type = other DNA
actatatagacattcacaga

SEQ ID NO: 301485 - DNA, 20 bp, synthetic construct
  source 1..20: mol_type = other DNA
cactatatagacattcacag

SEQ ID NO: 301486 - DNA, 20 bp, synthetic construct
  source 1..20: mol_type = other DNA
acactatatagacattcaca

SEQ ID NO: 301487 - DNA, 20 bp, synthetic construct
  source 1..20: mol_type = other DNA
tacactatatagacattcac

SEQ ID NO: 301488 - DNA, 20 bp, synthetic construct
  source 1..20: mol_type = other DNA
atacactatatagacattca

SEQ ID NO: 301489 - DNA, 20 bp, synthetic construct
  source 1..20: mol_type = other DNA
aatacactatatagacattc

SEQ ID NO: 301490 - DNA, 20 bp, synthetic construct
  source 1..20: mol_type = other DNA
caatacactatatagacatt

SEQ ID NO: 301491 - DNA, 20 bp, synthetic construct
  source 1..20: mol_type = other DNA
acaatacactatatagacat

SEQ ID NO: 301492 - DNA, 20 bp, synthetic construct
  source 1..20: mol_type = other DNA
cacaatacactatatagaca

SEQ ID NO: 301493 - DNA, 20 bp, synthetic construct
  source 1..20: mol_type = other DNA
acacaatacactatatagac

SEQ ID NO: 301494 - DNA, 20 bp, synthetic construct
  source 1..20: mol_type = other DNA
cacacaatacactatataga

SEQ ID NO: 301495 - DNA, 20 bp, synthetic construct
  source 1..20: mol_type = other DNA
acacacaatacactatatag

SEQ ID NO: 301496 - DNA, 20 bp, synthetic construct
  source 1..20: mol_type = other DNA
aacacacaatacactatata

SEQ ID NO: 301497 - DNA, 20 bp, synthetic construct
  source 1..20: mol_type = other DNA
aaacacacaatacactatat

SEQ ID NO: 301498 - DNA, 20 bp, synthetic construct
  source 1..20: mol_type = other DNA
aaaacacacaatacactata

SEQ ID NO: 301499 - DNA, 20 bp, synthetic construct
  source 1..20: mol_type = other DNA
taaaacacacaatacactat

SEQ ID NO: 301500 - DNA, 20 bp, synthetic construct
  source 1..20: mol_type = other DNA
ttaaaacacacaatacacta

SEQ ID NO: 301501 - DNA, 20 bp, synthetic construct
  source 1..20: mol_type = other DNA
gttaaaacacacaatacact

SEQ ID NO: 301502 - DNA, 20 bp, synthetic construct
  source 1..20: mol_type = other DNA
tgttaaaacacacaatacac

SEQ ID NO: 301503 - DNA, 20 bp, synthetic construct
  source 1..20: mol_type = other DNA
ttgttaaaacacacaataca

SEQ ID NO: 301504 - DNA, 20 bp, synthetic construct
  source 1..20: mol_type = other DNA
tttgttaaaacacacaatac

SEQ ID NO: 301505 - DNA, 20 bp, synthetic construct
  source 1..20: mol_type = other DNA
atttgttaaaacacacaata

SEQ ID NO: 301506 - DNA, 20 bp, synthetic construct
  source 1..20: mol_type = other DNA
catttgttaaaacacacaat

SEQ ID NO: 301507 - DNA, 20 bp, synthetic construct
  source 1..20: mol_type = other DNA
tcatttgttaaaacacacaa

SEQ ID NO: 301508 - DNA, 20 bp, synthetic construct
  source 1..20: mol_type = other DNA
atcatttgttaaaacacaca

SEQ ID NO: 301509 - DNA, 20 bp, synthetic construct
  source 1..20: mol_type = other DNA
aatcatttgttaaaacacac

SEQ ID NO: 301510 - DNA, 20 bp, synthetic construct
  source 1..20: mol_type = other DNA
aaatcatttgttaaaacaca

SEQ ID NO: 301511 - DNA, 20 bp, synthetic construct
  source 1..20: mol_type = other DNA
taaatcatttgttaaaacac

SEQ ID NO: 301512 - DNA, 20 bp, synthetic construct
  source 1..20: mol_type = other DNA
gtaaatcatttgttaaaaca

SEQ ID NO: 301513 - DNA, 20 bp, synthetic construct
  source 1..20: mol_type = other DNA
tgtaaatcatttgttaaaac

SEQ ID NO: 301514 - DNA, 20 bp, synthetic construct
  source 1..20: mol_type = other DNA
gtgtaaatcatttgttaaaa

SEQ ID NO: 301515 - DNA, 20 bp, synthetic construct
  source 1..20: mol_type = other DNA
agtgtaaatcatttgttaaa

SEQ ID NO: 301516 - DNA, 20 bp, synthetic construct
  source 1..20: mol_type = other DNA
cagtgtaaatcatttgttaa

SEQ ID NO: 301517 - DNA, 20 bp, synthetic construct
  source 1..20: mol_type = other DNA
tcagtgtaaatcatttgtta

SEQ ID NO: 301518 - DNA, 20 bp, synthetic construct
  source 1..20: mol_type = other DNA
gtcagtgtaaatcatttgtt

SEQ ID NO: 301519 - DNA, 20 bp, synthetic construct
  source 1..20: mol_type = other DNA
agtcagtgtaaatcatttgt

SEQ ID NO: 301520 - DNA, 20 bp, synthetic construct
  source 1..20: mol_type = other DNA
cagtcagtgtaaatcatttg

SEQ ID NO: 301521 - DNA, 20 bp, synthetic construct
  source 1..20: mol_type = other DNA
acagtcagtgtaaatcattt

SEQ ID NO: 301522 - DNA, 20 bp, synthetic construct
  source 1..20: mol_type = other DNA
aacagtcagtgtaaatcatt

SEQ ID NO: 301523 - DNA, 20 bp, synthetic construct
  source 1..20: mol_type = other DNA
caacagtcagtgtaaatcat

SEQ ID NO: 301524 - DNA, 20 bp, synthetic construct
  source 1..20: mol_type = other DNA
gcaacagtcagtgtaaatca

SEQ ID NO: 301525 - DNA, 20 bp, synthetic construct
  source 1..20: mol_type = other DNA
agcaacagtcagtgtaaatc

SEQ ID NO: 301526 - DNA, 20 bp, synthetic construct
  source 1..20: mol_type = other DNA
cagcaacagtcagtgtaaat

SEQ ID NO: 301527 - DNA, 20 bp, synthetic construct
  source 1..20: mol_type = other DNA
acagcaacagtcagtgtaaa

SEQ ID NO: 301528 - DNA, 20 bp, synthetic construct
  source 1..20: mol_type = other DNA
tacagcaacagtcagtgtaa

SEQ ID NO: 301529 - DNA, 20 bp, synthetic construct
  source 1..20: mol_type = other DNA
ttacagcaacagtcagtgta

SEQ ID NO: 301530 - DNA, 20 bp, synthetic construct
  source 1..20: mol_type = other DNA
tttacagcaacagtcagtgt

SEQ ID NO: 301531 - DNA, 20 bp, synthetic construct
  source 1..20: mol_type = other DNA
ttttacagcaacagtcagtg

SEQ ID NO: 301532 - DNA, 20 bp, synthetic construct
  source 1..20: mol_type = other DNA
cttttacagcaacagtcagt

SEQ ID NO: 301533 - DNA, 20 bp, synthetic construct
  source 1..20: mol_type = other DNA
acttttacagcaacagtcag

SEQ ID NO: 301534 - DNA, 20 bp, synthetic construct
  source 1..20: mol_type = other DNA
cacttttacagcaacagtca

SEQ ID NO: 301535 - DNA, 20 bp, synthetic construct
  source 1..20: mol_type = other DNA
tcacttttacagcaacagtc

SEQ ID NO: 301536 - DNA, 20 bp, synthetic construct
  source 1..20: mol_type = other DNA
ttcacttttacagcaacagt

SEQ ID NO: 301537 - DNA, 20 bp, synthetic construct
  source 1..20: mol_type = other DNA
attcacttttacagcaacag

SEQ ID NO: 301538 - DNA, 20 bp, synthetic construct
  source 1..20: mol_type = other DNA
aattcacttttacagcaaca

SEQ ID NO: 301539 - DNA, 20 bp, synthetic construct
  source 1..20: mol_type = other DNA
aaattcacttttacagcaac

SEQ ID NO: 301540 - DNA, 20 bp, synthetic construct
  source 1..20: mol_type = other DNA
caaattcacttttacagcaa

SEQ ID NO: 301541 - DNA, 20 bp, synthetic construct
  source 1..20: mol_type = other DNA
ccaaattcacttttacagca

SEQ ID NO: 301542 - DNA, 20 bp, synthetic construct
  source 1..20: mol_type = other DNA
tccaaattcacttttacagc

SEQ ID NO: 301543 - DNA, 20 bp, synthetic construct
  source 1..20: mol_type = other DNA
ttccaaattcacttttacag

SEQ ID NO: 301544 - DNA, 20 bp, synthetic construct
  source 1..20: mol_type = other DNA
tttccaaattcacttttaca

SEQ ID NO: 301545 - DNA, 20 bp, synthetic construct
  source 1..20: mol_type = other DNA
atttccaaattcacttttac

SEQ ID NO: 301546 - DNA, 20 bp, synthetic construct
  source 1..20: mol_type = other DNA
tatttccaaattcactttta

SEQ ID NO: 301547 - DNA, 20 bp, synthetic construct
  source 1..20: mol_type = other DNA
ttatttccaaattcactttt

SEQ ID NO: 301548 - DNA, 20 bp, synthetic construct
  source 1..20: mol_type = other DNA
tttatttccaaattcacttt

SEQ ID NO: 301549 - DNA, 20 bp, synthetic construct
  source 1..20: mol_type = other DNA
ctttatttccaaattcactt

SEQ ID NO: 301550 - DNA, 20 bp, synthetic construct
  source 1..20: mol_type = other DNA
actttatttccaaattcact

SEQ ID NO: 301551 - DNA, 20 bp, synthetic construct
  source 1..20: mol_type = other DNA
aactttatttccaaattcac

SEQ ID NO: 301552 - DNA, 20 bp, synthetic construct
  source 1..20: mol_type = other DNA
taactttatttccaaattca

SEQ ID NO: 301553 - DNA, 20 bp, synthetic construct
  source 1..20: mol_type = other DNA
ataactttatttccaaattc

SEQ ID NO: 301554 - DNA, 20 bp, synthetic construct
  source 1..20: mol_type = other DNA
aataactttatttccaaatt

SEQ ID NO: 301555 - DNA, 20 bp, synthetic construct
  source 1..20: mol_type = other DNA
taataactttatttccaaat

SEQ ID NO: 301556 - DNA, 20 bp, synthetic construct
  source 1..20: mol_type = other DNA
gtaataactttatttccaaa

SEQ ID NO: 301557 - DNA, 20 bp, synthetic construct
  source 1..20: mol_type = other DNA
agtaataactttatttccaa

SEQ ID NO: 301558 - DNA, 20 bp, synthetic construct
  source 1..20: mol_type = other DNA
gagtaataactttatttcca

SEQ ID NO: 301559 - DNA, 20 bp, synthetic construct
  source 1..20: mol_type = other DNA
agagtaataactttatttcc

SEQ ID NO: 301560 - DNA, 20 bp, synthetic construct
  source 1..20: mol_type = other DNA
cagagtaataactttatttc

SEQ ID NO: 301561 - DNA, 20 bp, synthetic construct
  source 1..20: mol_type = other DNA
tcagagtaataactttattt

SEQ ID NO: 301562 - DNA, 20 bp, synthetic construct
  source 1..20: mol_type = other DNA
atcagagtaataactttatt

SEQ ID NO: 301563 - DNA, 20 bp, synthetic construct
  source 1..20: mol_type = other DNA
aatcagagtaataactttat

SEQ ID NO: 301564 - DNA, 20 bp, synthetic construct
  source 1..20: mol_type = other DNA
taatcagagtaataacttta

SEQ ID NO: 301565 - DNA, 20 bp, synthetic construct
  source 1..20: mol_type = other DNA
ttaatcagagtaataacttt

SEQ ID NO: 301566 - DNA, 20 bp, synthetic construct
  source 1..20: mol_type = other DNA
tttaatcagagtaataactt

SEQ ID NO: 301567 - DNA, 140872 bp, Homo sapiens
  source 1..140872: mol_type = genomic DNA
gggattacaggcgtgagccaccacacccagcccagaatgtttattagaatgcacaattaataccagaggcagtggggaaggaaggactgagcagaggaggaagttgagttgtgattcaacccaacaactgcctggctggcatggggagctctggagttaaatagggccatcagactttcccagtgtggggccaacatgactgggtctttatacccccacctctgtcagtcactcaacgtggtctccctgcaacaaggtgactcttgcagccgagacaatccctgaagggacagagggctgaagcctgtctgccaacagcactcccagtggctggaacaagtccttccctataggggaatctgggcggcacacctccatctccatgtccatcacatacgatatcacagacatttaaatattttgataactgtacataagagtttcctttataatcttatagatcttattttatgcatttgaaaatattcttctgagacagggcttttatcatattgccatagggtgccacgatataaaaaaggttaaatactctctgattcagaagtatccaatgatgacttctctctcatgcatttaattgaaaatctggtttttctccttctctgctagttctctacctctctccccacctcccacatcatagcctattcacatatgtctgaatctcatgatagacaagttcaggttcttttcccaggttctttttaccacatccccccacccccacataaaaagtatatatggcacagcctaggttccacccaaatcctttctcctcttcttcctgggcccacaactctcctacatacattggtataccttgcgcttagggatggccatgtgactaagttctaacagtggaacatgatcagatgccacttccagcctctaagacagccagtgtgtttcctccataagctccttctcttcctcccaactggagactctaaatgatgaccctgcctcaagcaagcaaacaacaagtccctcaggggtggtgtaggctgcaaatggaaggagcttgagtcccaaaccttccacggagaaggctggctaccaacctggatcactcacccaagactgctcgaagagttggtttgaaccattgtgttttggggtctatttattacaacagtttagcttgctttgtgaatagatttagtggcagagcctccaaattctatagatacattgatctcagtcctaaccgcatctggaacaccattaaataaaggaattgcaaacccagagaaggtaatgaatttgtctaaggtcatacaagatggctaggatcaggacccaactctccagttttctttcttctctgctattctgccttctgtgatcctacataagtgggcatgattgtataacatatgcggccatgagatttctctttcagcaagagaaagggacaggaagaaagagagggaatgcattttcttggcctgaattagtgtgagccattagttacctacattgactaaattatctggaatgaacattcaactctacatcacatatagttaaaatgacagatctgcttaagattgtttctagcatacgttatttcaatttaggcaaatgtgaccattcagtgtgaggggaccatactgtcattaggtccctgtcagttctcaattatactgttatcttagagggggaaaaatgtgaaatttgaatgtagacgagtgttgatttgactgctacagtttattttacgtatagaaataaaataatgtgtagcaaaagcattattacaaagatgataatgaaataactagtatttataatagtataatagtatagtatttataatagtatgatagtttaatgactatttgtcagatgttgtgtaagaaactttatacacacacacacacacacctcatttaattcctgtatcaatcaggatacaggacgctgtggtaacaactcctcaaatctcggtggcttgcacaacaaatgcttatttcttttttttttttgacaccaagtcttgctctgtaacaggctggagtgcaatggtgcaatctcggctcactgcagcctctgcctcctgggttcaagcgattctcctgcctcagtctctcgagtagctgggaacacaggcacgcgccaccacatctggctaatttttgtgattttagtagagatgggatttcaccatgttgctcaggctggccttgaactcctgacctcaagcgatccacccacctcagcctcccaaagtgctgggattacaggcatgagccactgcgcccagccccaaatgtttatttcttgctcatgtgacatgtacttcctcgagtttttccttcctgagatctaagctgaaggaacagctctctggagccacgccattctggtggcggaaaggaagagtaaaagtggtagaaccttgcaatgctcttgaagcgcctatttggaatgtctacatcatgtaaatggtaatggacaagtatgtataatccccacaccaaaaaaaggggacactattggggacaataaccacatttcaatgctgcaagacggatattgactgcacccccttcccactttcagaaagaagaagagtaattttgctgaactccttctagagactggaaatgtcccttccagttggggtgattagggaaggctttggtaaaatttgagctagagtttgaaggttaggtagactactggtgggtgaagaaagaacaaggacctttgtaggcaaaggaaaacctcagaattacagaggtggaaaaagagttctagtcaagccacttcagctggctacagagtaggtgggaaagaaaatgggaggacaagggctcagatgatggggggttggggcattggggggacacttgaaagctaaactaaggggttgaacttaatttaggaggcagttagaagcttttacatatttttgagcaagagagtgacataattaaaatgatctgggccaggtgtggtggctcacacctgtaatcccagcactttgggaggctgaggagcttgggtcacctgaggtcaggagatcgagaccagcctggccaacatggtgaaatcccgtcctactaaaaatacaaaaattagccgggagtggtggcatatgcctgtaatcccagtagctgggaggctgagacaggaaaatcgcttgaacccgggaaacaggttgcagtgagccgagatcgtgccactgcactccagcctgggcaacagagcgagactccatctcaaaaaaacaaaacaaacacacacaaaaaaccaaaaataaataaataaaatgatcacttctgaatactgatctaactaggggttgcagggtgggctgatatagggagaaactggagagcaaggagatcactaaggtccctacatgtccagaaccaagatagaggtcttgaactaggatggtggcagttagaacaacaacaacaaaaagtcaattccaggctgagtgcagtggctcatgcctgtaatcccaacgctttgggaggctgaggtgggagttagaaagcagcctgggcaacactgcaagacctcctctctaaaaaaaaaaaaaaaaaaaagttagccaggtgtggtggtgcccacctgtagtcccagcaactcagaaggctgaggtgggaagattgcttgagccccaggagttcaagcttgccgtgagctacgattgtgccactgcactccagcctgagcaagaccttgtctccaaaaaaaggtcaattccactgacttttctaaggtgtacaccatcaaggggcagctccatctccaggccattggctcatgagacattctgtagtcagaaggctagggcagattgctttgagcaagcccccatggtggttctcactcctacttctttgggtatatgcccctctgtttaaaaataaagttaatatgcatttaaaaaaaaaaaggagaaaaaggtcagttccagaaactgtgtgaataaagcattttacttgctttttctattaatctataacatatgttgattttttaaaaagaatataagagctatgcaaattggagcttcaagacaacttcccatctccctaggaggagatggctgccctaaacccccctacatagaaatcatcccactgcttgggcttaaacttgatgttggggaaatgaaaaatccaagctaaggccgaagcctggggcctgggcgaccagcagaatgaggaccactggtcagtttcaggctgaggtgcgtcttccaggggacaatctctagctggcccttaaacattcagacttcaagctctatttacagcataaaggtgtttcaaaagacgtgatacaaataactgcaaatgctctgcgatgtgttaagcactgtttgaaattcgtctaatttaagatttttttttctgacgtaacggttagattcacgtttctttttttttaagtacagttctactgtattgtaactgagttagcttgctttaagccgatttgttaaggaaaggattcaccttggtcagtaacaaaaaaggtgggaaaaaagcaaggagaaaggaagcagcctgggggaaagagaccttagccaggggggcggtttcgggactacgaagggtcggggcggacggactcgagggccggccacgtggaaggccgctcaggacttctgtaggagaggacaccgccccaggctgactgaaagtaaagggcagcggacccagcggcggagccactggccttgccccgaccccgcatggcccgaaggaggacacccacccccgcaacgacacaaagactccaactacaggaggtggagaaagcgcgtgcgccacggaacgcgcgtgcgcgctgcggtcagcgccgcggcctgaggcgtagcgggagggggaccgcgaaagggcagcgccgagaggaacgagccgggagacgccggacggccgagcggcagggcgctcgcgcgcgcccactagtggccggaggagaaggctcccgcggaggccgcgctgcccgccccctcccctggggaggctcgcgttcccgctgctcgcgcctgcgccgcccgccggcctcaggaacgcgccctcttcgccggcgcgcgccctcgcagtcaccgccacccaccagctccggcaccaacagcagcgccgctgccaccgcccaccttctgccgccgccaccacagccaccttctcctcctccgctgtcctctcccgtcctcgcctctgtcgactatcaggtaagcgccgcggctccgaaatctgcctcgccgtccgcctctgtgcacccctgcgccgccgcccctcgccctccctctccgcagactggggcttcgtgcgccgggcatcggtcggggccaccgcagggcccctccctgcctcccctgctcgggggctggggccagggcggcctggaaagggacctgagcaagggatgcacgcacgcgtgagtgcgcgcgtgtgtgtgtgctggagggtcttcaccaccagattcgcgcagaccccaggtggaggctgtgccggcagggtggggcgcggcggcggtgacttgggggagggggctgcccttcactctcgactgcagccttttgccgcaatgggcgtgtgtgtgtgtgtgtgtgtgtgtgtgtgtgtgtgtgtgtgtggaggggtccgataacgacccccgaaaccgaatctgaaatccgctgtccctgccgctgttcgccatcagctctaagaaagacgtggatcgggttctagaaaagatgactccctgcacgcccctccctgcacctcccgagcagtgattccgacagggccttcactgcccctgattttaggcgggggccggccccctccccttttcctccttcagaaacccgtaggggacatttgggggctgggagaaatcgaggagatggggaggggtccacgcgctgtcactttagttgcccttccccctgcgcacgcctggcacagagacgcgagcagcgccgtgcctgagaacagtgcgcggatcccactgtgcacgctcgcaaaggcagggttcacctggcctggcgatgtggacggactcggcggccgctggtccccgttcgcgggcacgcacagccgcagccacgcacggatgggcgcggggctgcaggtgcatctcggggcggatttctttctcagcgctcggagcgcagggcgcccggcgtgtgcgctccctgccggaggcgcggggctggcgcgcagggctcgcccctcactgcggcagtgggtgtggaccctggtgggcgaggaagggggaggataggctgtgcctcctcccactcccgcccccagcccccctttttttccccctcggaacgcgaggtgccatcttttttcggcgtgtcacgtctttacggtgccatgccaaaccgggtggccgggcttcataggacagggcggggcctggcattaaagggagggggacaatcagcgctgaaatcttggcgttttgctgctgcgggcgtgagcactgggggcgttcgcccagcaccttcttcgggggctctttgctttgtctgtagaggttacgtgatctgcgctcccagccctggtttctggcttttattctgagggtgttcagtcaacctcccccctacgcccatgcgcctctctttcctttttcgctcctcatttccgagcccattgttggatctcgaggcttgctgggttcgatgaactcgagtcaaccccccgacccccggcacgcatggaacgggcgtgaccgcgcgcagcctcgtctcggagtctgccggcgccgggaagcttctgaagggatgggattcgagtctccgtgcgcgctgcgggcggcggcagagggatctcgcccctccctacaccccaagtgtcctgagggccacgccacaccaggttgcccagcgagggacgctggctacccatccggggatgggtggggagccctggcggggcctctccggctttacgccctgttgcttcgcctggccggagaatgtgaggaaggggcataaggttactggtgcttcggccacacccatctttctgagcccactggactgggcgcagaggggggattgccatggaaaccacaggtgtccggagaggggatcttggggctggcctcaccccttccctgcggagattggggaccctggggtagggggagccgcgcccagtcggcctcctggaggacacgggaggaagccccgaacccccgcgcctgaggctgtttctgattggcccctggaggccgcagacacgcagataggcggccctgggtgtatttttattaatattatgtccgtactgattaatattatttatcttaaataaatttcacccgtgtccaagttcaccgcgcccccaaaaccgagtctggggcggcagggggaactcctggccaacgaatccatgcctcgccctcctgtgatgaacctggtacgcacggttttctggttaattctatcgctgaaaactggtgcggggggcgcacttctgagacggaagagcatctaggagctgaatcctccacgcgggtcgcccaggttgatctgaatttctggggaatggcttggctgcccgcccgggaccaggccgaccctccttgacggtggcgtagagggctggagcctgggtactgcgaggctcctcgcatggctgggcccgccgcgaggggttgcagagcggctcagggatcgattcaagcatcgtctctcctccctcgcccccagacagagctgggcgcggggttccccttccagatggagcgagggtctcggggtggccccggaaaaggggagcccgcggccacggctacgtattgccatctcgcgagcagagatgtcacctcctgcctttggaggaaagggagcccggtggggatgagcgcatttagcccaatgctgggaacaaagcgcactccgcgcttctgcgatttcgctccattttgaaatgtgttggcgctttggtggggccgctgcggtgggcaaggccgggggcgctgttaatggaggaacctcagggggacggtccttcgtaggaaactctatcctggctctgcgcgcgctttaaggaaatggcttccctccaggacctcgagggatgcagcttttgcgcggatgacggtggggtgctgaaccagccggtgcgcctctggaaatgtctgggcacggatcctggggccatcgacgactcctccccattcccagcaggcgggagctcttacattccgagcgagtgacccctctcaccctctggcgctcacacacctgtaactccaaacctccgtctcagaatggtccaggctggaagggatgatgggggctccgacagcgactgcctagctcacccctctgcgtgctcaggctccaggctcagcaggaccaatttgagttctatctgatccccctcggccccttaactgacccatcctacaggagacagggaaatgtctttcctaccgcggttgattctggggtgtcattttgtgttttgtgatggctgcttatatttactgtataagcattgtatttactgtataagcattgtattataattactgtataagctgcttatatttactgtataagcatctccaaatcctccctctacgtaaacaaattaatggataaacagataagtgtatcccctgcccccacccctgctacgcaggtccggagtgactcttgaagctcatacattccttggccaagtttgcttctctaacagatgtttatatagcaataacctggcttggctcttgggttcacctttggacgatttggggaaggggcttgttggctttgctgggttttggatgagtgacagtccatgactgttcctgctggaagggcgtgacttttaagtggtttctaatatcaggcattgctcctccgacaggaacaaaagaaatggatactgcccataaattgttagaaaacttagaatcgctttgattgaggaaaggttagatttattccggttggaaaaagtggcctttctattaaacgtgccctttgaccctcatgcccttggaggtcggtgccagcctggagatgggataagattgtggttttccttctgcctttttaacatctgttgttacagtccatttgttgaaaatttaaagaaactgttttattccactttccctcagcatttatgtgtgtggtttcagtagctctgtggctatatgtacgaacacgtgttatttttccaattggacatgtgataattttccaactggaccttgccttctattgatgtatttatttagcatcttccttactccctccttgaaaaagaatcactcaaaaacaaataaaaacagccgtaggggcctaatacagtgctagacatacaagaggtattcggtccataccaaatggattttatccatgaaggataaatggggaaatacagtgggaagcaggtgggaaactgcgtttgactctgctctttcctccaccaccactttcctcatcaccgtgttcagagacccccaaagccccctcacactcccagaaacacccccctggccactcctaacttgccatgcccaggagttaggtgcttccactagtgacatggagctggcgtttggggggcacctcagcaggtgacgggaagagaagaccccagcctcaccagctgggctgcagcagggagaggagtcctcatgttccagcagggactctcagctgttttcctgtaaaaccatggttctcaactgggggccactgagatgtctagagagatgtttttgttttcacaactcggggagggtgctactgacatcttgtgggtagaggccaggaatgctgttaaacatcctacaaggaaggcacaggacagtctcctacatcaaaatatgacccagtcccaatgtcaccactgctggggttgacactggcactgctatcttaattacattcattgagtgtcttttaggaggccctattctaagtgcttgctaagattatctcatttaatcctcacaacacttccgctatgtagcaggtgctgttattatctccgtgatggggaaactgaagcacagagagggttagtaacttgctaaaggtcacagagccagtgggtggtggagctggttgcctgacactagttccctcccctctcagccacatgtgggtttacttggccattgtggactagtctgggaacccagatatgatctataacattgacccagtagaatattgattccaaaaccactgtctcacaaatgaatttttacaagagtctgtaatcggagcatgacccagaataaggttagggagatgtggagttaaagctctcaatttcttatctggccccgacacagagagcaaggcatttcactctacattggtgctctgtttataaaacaaagagcaaatatctcttcctaaggtccttaaacctcttcccccaatccagggtttctggactgctctgccatatgacggggcagctggtttgattgacccagggaaggctggaaatcaagactgggggatcaagacgtagattcagtgtggccaaggtcaagtctctgaggtttagggacatcagatccccagcttaggttctgtacctcggcaaggtgaaagcgttggcgcccactgatgaggcctgctctgagattgtgggtgtgggttgagttgggtgggcataggcaagtcctcttgtaagaatcttttggcaaagatgggcctgggaggcttttctcacttcctggggcccaggctttgcaataagtattccattatactgtggtaccttggggctacctgagaatcctctgtctcgcccctgttgccttgccaaagagtttgctgtccaagaattcctttcctgtctccaggtgccatgctcctgccacctctgccaggttccctgcctgcccagatggctcccaactgagtgtgaggaggaatttgagacaggttttgagctttctgggttctccagttaggaaactttctgtaagcatgcagatagaatgggcttcagcaaaatacaaactcgaacaacttccatgtatagtcccttaattttctttgcttttttcatatttcatcaggctccatgctgagcccaatcagggacccgatagaaatccaaacaccatgtcagcgagtccccaagaaatgcattttgtgccaaggctattcaaggaaggtttgggagcagctcaagggcagacactgttaccctcccccaggtccccagtgcagggcagtgttctgcatgtggaggcagtttggcctaatggttaaggaggtaggctctgatcgggcctcctgggcacaaatcccagctccctgctcactgtgagacctaagccatattgtttagctgcttggagagttttttgtcatccacaacttggagtatgatggtacctgtctcacgggttgccatggggttcacacaagctaacccggtactcactagggccaagcacatagtaactgctcagtaaatggcatcatcggcggtgtcctgtggatgagtgcttgtgattggctgaatgaccagaggggtctaaagatcctggtgatggaatcagttgtacagataaattgttacactgagtagggatcaagataggaaaagtcggcaactacccagctcccctgcaccaaactgggcagaagtggatcctctgaaaattgcacacacccatgtttaaatgtacacacagaactcttgccacaggcaagcggagatttgtcatctgctgtccctgcctcatcttcttcctgaaatccactccatgccaggaataaactgcatgctctccaccagcccaaactgacctgccttcccgccagccatcccgggcagggtgacctggcttagtacatcgggttcagagatctttccagtttactcgttgaataaaaagtgagggctgatcgagaaagtaatggcagtcagggaaggcgaaggaggtaaagaagagattttacaaatgaagtaattcaacagagtgctgacattggtaaactggcaaacagatttcagggtggttggttgagagtagagtagaaaaggattaaataaagcaaacttgtggtgtactgaatcttaggaattccatgtatccaataagtatagtcatttatgaattaataaattcggcctaagaagccttcttatcgcttaaatcaagactaagtaacaatatatcagttttaaaaagtcattatatcagaaaatcatttaaatgatacacatagatttccaagattttactttaaccgaaactatataaatgtgaatttgttcacccatcttttgacacagggctcaggtcttctcttggtgtctggatcagccagttgaaatttcttgtctgttttgcctatgccacattaataatgcactgtctgggtcctccgatttcagtttggattttgggtttacattgtggagtcatctgaatgcagaatccttcagggattttacttttttttttttttttcatggtctttaccatcccatttgatagtaaatattactcacctttatgaagtctttccaaaacattcaactaaattttcttaaaatcattgaatgatttgaagagcttattcctcagcacttttactccatcagcttgcaccttattttttaatctttttttgagacggagtctcgctctatcgcccaggcttaagtgcaatggcgcgatcttggctcactgcgacctccacctcctgggttcaagcaattccgcctcagcctccgccgtagccgggactacaggtacacaccataatgctcggctgatttttgtatttttgtagggatggggtatcgccatgttggccaggctggtcccgaacttctgacccaagtgatccacccacctcggcctcccaaagtgctgggattacaggtgtgagccaccgcgcccggccagcttgcaccttatttaggatatgtgattattatagcaagtctggtgtacatacaagattttgaatgggcacagatgacctttagtaagtgcttggctgtgataagaggcagtcctgactgcagatcaggctgtgtggaccccagccttgcatgtttacagaccttcatgtcttattcttacagggtatcagaagaacacctactggggaaacttataaattagtaaaaggtgggcattctccccgcccatcttctgtctgtctgccaggactagcacagcactttgaagtcattcacatagaatcccaacttaagagggtaaaatcctcctcaacagactgaaaataagtttaaattccctttgctatattaactcccctgaggaaagagtcttagatcaatgtccaacactaaaaacagttttaaatcagcaagtgagaattaaatctgaagcaattgataataatgtttcattcattcctctcctttggccccgtccaccctactgctaaatccaggcatcaaagagaagagggacataattatctctagtcccagctgctggttttccttccagcctatggcccagttttctgttttactgagaaggctggtgatgttatcttgggatctaagtctgcagtttcaccacaaaaagtccagggatgcactttcatgcttgtgtcctcctccctgggatagcaaggatattagaagacccctggctctgtaattgcttgtcatgtgctctacagacgccacagaatgccaagaacgaagtgctgggaaggacaaattcatggaaccgtgggacggtgctcctcccccagcgtaaaggacagctcctcctcctgaattggagccagcgttctaaatcatgtgtcaacagagttgtcctggatcggatccagttctgccattgatttgcaggtcatttcagtggtacctgtttccagttgttcttaattgaacagtggcaccaaactattgtcttgcctcatccccctcccatggcctgtcccccaaaaagagacttcttgggtaattaatcagggcaacatcaggcagtctgggcgcggtggctcacgcctgtaatcccagcactttgggaggccgaggcgggcagatcatgaggttaggagattgagaccatcctggctttgtgaaaccccgtctctactaaaaatacaaaaaattagccgggcgtggtggcgggcgcctgtagtcccagctactcgagaggctgaggcaggggaatggcgtgaacccgggaggtggaggttgcagtgagccgagatcgcaccactgcactctagcctgggcgacagagctagacttcttctcaaaaaaaaaaaaaaaaaggaatctctttggttttatatatattttttttatatatataatatatattaaaatataatatatatatttatataatataatatataaatatattatatattatatattttatatattatatattatatatattatatattatatatttatatatttatatattatatatatttatatattatatatttatatatattatatatttatatataatatatattatatattatatattatatattatatattatatatttatatatattatatattatatatattatatattatatatttatatattatatatttatatatattatatattatatattatatatttatatattatatatttatatattatatatatttatatatattatatattatatattatatatgtatatattatatatgttatatattatatatatttatatatataatatattgtatatattatatatctaatatattatatatattatatatattatatattataatatatattatatattatatattatatatatttttatatatataatatgtataatatataatatatataaaaacatatataatatatattatatattatatatatattatatatattatatatattaaatatattttatatatattatatatatatacacatatatatatataaatgaggccaggctcggtggctcacacttgtaatcccagcactgtgggaggatcacttgaagccaggagtctgagactagcctgggcaacaaaacaagatcctgtctctacaaaaggaaactgtaaaaattagctgggcatgatggcatgtgtctgtagccctagctacttgggaggccgaagcaggaggatcgcttgagcccaggagttcaaggctacagtgagctatgattgtcccatagcactccagcctgggtaacacagcaaggccctgtctctaaactttttttttttaattctatttatatttacatgtatttaaatgtgaatattcactacctatttgttgcatgcctgcattttttatactgggcttgccaaaaacccgaacagctttctactttgacaatgtatcagaatttaaatcagcaatatgttaataagccaagcaaaggttatatatgcaaataaaactgttgtctataacctcctgttacactggggcacagcaaaagtcatggtgtagtcgcatgtgaacctgtccctttcatagctgctcattgccaggaaacatcaggaatagccatttggaagagtcatcagccctcccaccatccgttttctgtcttgtcttttccctatgagcaggggaaattccacgctggccccaatccccagtgcagcggctcagcctctgcctctgctgctggtccccatgaggccagcttagaaacggaggattttgcagaacatccctaaatccgcttgaataatgaagtgatcattcataaactcacctgaaccttattaaaacctatttaatatttttcctggataatcctatagggataacttgcctcctgggcttctctccaccgggttcagttcttcctttagtggtgaagttcctcccttcttagcatctcaactgtgcctgagaaaaggccagtggcggctgcactctgttccctgtggagtgttaataaagactgaataaattgaaataaatccctttcaatgtcattaagtgctataaataatcatgaaccaatgttcgatggctgatgagaaatgcaagaaaaaatttttaatcagtaggattcataagttgacaatctgggccaagttaaaaaaaataaaaataaaaagacttttaaaaagatcttatcgtttgttaccagtaagactgaattccagaagcaagctactccctcatttgtgggcccctgttatcactggctgcttagggttgccaagccctgaattcatttgtcaactaagagatttttggccaagattaagatttcccatgcctccatatttccatctgagaaatggagattatactgtcttccccctcagaatggatgataatgtggtctctcttctgttcgcatagtcatagaactgaaataaaacaacttaagagaattcctttgagcttctcagaagtgctgcagggctgggggatgcctcccaggagccgcagtcaggtgctgatctgaagtctttggtgggctgactttagcctgacctgaaatagtatagctgctgccacctggctcccttagcgtcagtcagacggtgcagctggttcctaggggtgagggctgagccagcagggtccgtgcccaggagggatgcatgggtggccacagcccagcctgcactgatcttgtctgtccccttctttggaaggaaggagccccaaaccagggtgcaagacagtgggtgggggtgccttgagcatgacctcaagtgatttccagcccctgccagtgctgacttctctggggaagggctgggacttccttctgggctcaagtcacgacccttggatggaatttcctgggagcttttctgttttttctggagttttcagttttttcctaaccagacagggacttggtacagaatctcatattctaattatgcctaggagcagcctctccccaccactcacagtgtttagcatgtgacaggaatcgattaaggcatgagtgattaaattaaagccaggcattgacttggatggtgtaatattctgacatctgtttggtgtcaaaggcacggggcaggcgcgttaattgaactgcttgcacctggcatttgaattgagccagagcggggctaaagtcagtttgccttcaccctgtaaatggagggtttctccggagcgtggatggtgggaggtatttcagggtgtatgcataacccccaccctgacaatggcccatctcttctccagcgtggccaggtttgagtgccagtcctgggtgtccagtggccccatagccttgcgttttagtaaaatgctgcccccattaccacctggtctgtgcacttcggtcactggaatttgccatcttccagtcccgaatgtggcaagccatggagccttaagctcttctccctccacatcctggaacagacccgccagtttcttccaggcattgcctcagtttgcccctctgtttccagtcacactctcaccagcgataaaatgattttagaccttatcatctcaccctcggatccttatggaaacaataatgagttgttccctgtttcaattccaaaattcatatccaatccgttttgcatgccattgccaaattcctcccagagcaaccccgtcacctgccctggccctctccaagtgtggtcctgccatgggcatcgcctgctaagccaagctggcctcgagctgcctgcccgggtccccacaccttggctcacctccctgcccagtcccgcctcctgccagcctgccctgtggctccttcatagatgccgtgctctttctgccccttgctcacccatggcagccttgcccctctctccctgccccaccccctatttaaattgacctgaccttcctcagtgtccatcttccccgaagctttccccagccttggcactcaaggtccagaggctacgcgtttcctctcacctgtggcagcgccgtgctccccagtgcctcacagtttccttcttgcccccgcttcctgtgtaggactcatctgcccacaggttgcacgtcctgtgagggcaaggactgtgtcttatgtgactttccttctccagtcacagagctgggcacatagatagctcaaaaccctctttattaacacagttggatgttgagaaatcaaacaggccaatgtcaaatgagctctccttatttaaatcaagtcagttctccacctcctagcactcagttccagtactctatatacatggaaataataaaaaacacatttcctttgaaacattctataatcgttcctttgccctacttcagaccaacttaacgcactccccattggtccaaatgagttttgctatacgaagatgctgataataatagcagcagtggattattctgctaaaaccattgcctcgttaatcctcagtcccgaggtggggattattatcctcattttgcagagaagcaaactgagactcagagatttcacagctggggagggagccagctcatccctctgtccaggcccaagctctctcccgcttgccttcctgcctctgcaacctcagagcatcccccatctggttctactgcctgtgctagtcgtgcaggagccaaaagacacgtctttagtgctaaggactggagaagccatgccctccagcctctgtgaatgggtcatatgtaacatgagcctggagaaattatttgaaaccaaaggcaagcctctaaaccaggctgctgcttcatggcgccggtgacggcagaaccaaatttagtgctgtgggcaggtccacacttatcaaatagagaagctcatttttcttccggctcacatcaagcatgaaaaatgttcacacataccccccacacacacatgctttccggaggggtccatgtggctagaggctggaagatgtggatgagaggagcctggcaggtaagcccagggaagatgacattcagcttcccagacagcatctacagggagaaatttaattaaaagtggggcggtttccctgagcaaggcagacaaagtcagccctctactgttaagaaaaagggtcacagtgagaggggaggtgaggagactgagtctgtattttctagtctgttgggctacactacctgatcccccttcctcaaaaatccactttactttccccatgtctacaccaatgtggttcacactctgggaccaggaaaagggggagtgatggggaacagagaagggaggagctcacacagctgaggctggggttatgcatatcgaattacttagaatttgcaacctcacagggtactttcatggcgttgaaatacacttcccacagccaccctccctctaactaaaagcaagagtcatttctcagttctggtcttgcctcccacgttctcctccacatttaagaaaatccaccagctacaaagtgaagataccatatgtgatatcccaccctagtttctgttttatcagggtttggagcaggtggagcaggcagagggatcatttcagcctataaattgtattaagggtgagtactgagtcattcttcaagaaaagttttagaagcatccaaaactgaagggtggagccacctggagacagtatcatcagtcctggccccgagcatggcctgcataggcccccatggatcccagcgggagctgcagagtgcgggcaccttggcacacagccctgagtgcaaaattaggagctgggcagagggcatctctctgtcgccattgggcagcccagggcacactggtcatagccttagaccacgaacaccctgtgcccgggggacagatgcaaccagtgtgccctgggctgcccaatggcaacagagagatcgacacctggaccccatgtcacggggactccactactaaggctcctaagactgccaccttccagtgggataagccctgcctcctactgggcccacaatgtgcagagaacacttgggactacctggctttctggatacacaaatattgatccaatctggactaattagaaggtcagtcccaataacaaatcgaagtcagctgggcgtgatggctcactcctataatcccagcactttgggaggctgaggtgggcagatcatttgaagccagaagttcaagaccagcctgggcaacatagcaaaaccctgtctctactaaaaatacaaataattaggctgggtgtggtggctcatgcctgtaatcccaacagtttgggaggctgaggcaggtggtcacctgaggtcaggagtttgagaccagcctggccaacagggtgaaaccccgtgtctactaaaaacataaaaattagccaagcatgatggcatgtgcctataatcctggctactagggaggctgagacaggagagaatcgcttgaatccaggaggtggttgcagtgagctgagatggtgccactgcactccagcctggttgacagagcaagactctgtctcaaaaaaaaaaaaaaaaaaaaaaaagccatgcctggtggagcactacgtgtaatctcagctatttgggaggctgaggcacgagaatcacttgaacctgggaggcagtggttgcagtgagctgagatcgcgccactgcactccagcctgggcgacagagtgagtgagactccatttcaaaaaaataataaatctgagtcactttaatattgttatttggatgtcaacctctaggtgtttgagacaggagagtgatatgggggcactggaaacacacaggcacggggtgtcctcacacttgggtagcccacacgatgtgatttcagggtgctgggaggtccccccactccccaaattactaacaagtggatagtactttacagtttatatgatctcatttgattcttaacatgagcctgtgagtgaaaaattccttcccctcttctacagattaggacgttgagattcagggaggttcagagggattcagggaagtcaagtggcacctggagtcccgtggctaatttgaggccggtaggggattcgaacccaggatttgtgcttcttatgcctgggcttctgctccctggggcatggtcttccccctagctttcccattcactgctttagcctaggggtcctaccctttattaaactgccagtgcctcactgcttttctcccccaaagacaaaaaaaaagtgtttttgcttttgttttgtttttcatgggcagagacctggaatttcagcttgagaatttgtgccatatgataaataaatcaacagatggctttttccttaaaaaaaaaaaaaaaaaaaactaagatgtatttgcagtgaggcataatttgtaccaaaaagtgctcaccacactgtagtcatgggggcaggaggcagccgcgggtgaagggagaaatcttggagtccaggcagcccccttctgggctgaactggggagctgggggtgctgccagccctgccaggttctcctaggaggcggcagctcatatggctgtgggaggaggcagagggagcctcatatgcacccacatttccagggatctagaagacagaaggaggaaaaccaccatcatgttaaagcagacagttaggtaacacatcctgtaatacaagttattttttccacatctaaaggctaaaaatagttgttagaatttaaagataattggtaaatgagtttctatccttctagtttcacatcaaatggaatcatgctgccttcacatcactagtgcccgttatttgtgtttaatttccacaatgttgtctaattccactctttgggcttccccagggatccagcctccctcactcgcccatcgcagggagatgctttattcatctttgtgtcttctgtgccgggcatagcgcatggcacagaataagcactcagtaattgattcacgagtgaataaatggatgagtgggtgagttcaatattgactacaaaaaccctaaggccacactggtgagtggctgcgcctgtagtcccagctgctggggaatctgaggcaggaggatctcttgagcccaggagtttgaaactagcctgggcgatatagcgagaacctgtctcaaatgacaaaaacagggccaggtgcagtggctcacgcctggaatcccagcactttaggaggccaagatgggaggatcacttgaggccaggagtccgagaccagcctgggcaacatagggagaccctgtctctacaaaaaattttttaaaaattagctgggcatggcggtgtgcgcttgtagtcccagctactcaggaggctgaggcaggaggatcacttgagcccaggaaattgaggctgcagcgagccatgatggcaccactgcactgcagcctgggcgtcagaacgagacctgctctcaaaaaaacaaacaaacaacaaaaaaaaaggctttcttaaagagacttgagaacagaaaggggaacagatacataacttatatatttatttgttcatctttccaccttcctggagggtggaggggaacaggtctgtatttggagttttgaatgctaaaagtgggaatacatgtactgtttgccatgatctgttcaaaagttaagccaaatgccttagattctcctgaaaactggaatgccactgtaaactataagccccacttcaaagataaaagatcttgatgaacagggctgggtctgtggactgggcctctccccaccacacaaggaagggtggtgccagttgaaggaaaatcacttaaatccttgctgtctcctaataaggtgtggtcccaggtagggctgtcagaattagcaaattaaaacacagggcatctgtgaaaattagaatttcagataacaacaaataattggcataggctgcataatgtccctcaaagatatcaggtcctaatctccagaacctgtaaatgtgatcttatttggaaaaggggtctttgtagatgtggttaaattaaggattttgagatggggggattatcctgtattatctaggtaggtcctaaatgcagtcacactcatccttgtaagaggaaggaagagagagatggaaaacacagaagagaagacaatgtggtgatggaggcagagattggagtgaggtggccacaagccaaggactgctggcagctaccagcagccagaaaagtccaggaaccaattctctcttggagctccagagggagtgtggccctgctgacaccttagcttcaacctagtgatcctgattttggactttggccttcagaagtgtgagggaatgaatatctgttgttttaagccaccaagtttatggtcatttcctacagcagccacaggaatcaaaaacagtaagtatgtcccatgcaatgtttgtgacacacaccaaaaatattacttgttgttcacctgaaattcaaatttaactgggtctcctgtattttatttggccaacctagttcccaggcccaaagaaagaggcttttgaaatttgcaagaaagctggttggagctgtcagaaagtggactttgtaaacacagtaccaccgaaccaatttgaactgtactacctctagacaaaagagagggcagtcagacagttgttcgtgatttcttctttcaacagtcatttgagcacttactacaaaacagaagctatgtgtaagggtggaggcgttagctgttaatcaggacctccaggctaagtttctgtattagtccgttttcacgctgctgataaagacatacccgagactggggaatttacaaaagaaagaggtttaattggacttacagttccaagtggctggggaagcctcacaatcatggcagaaggcaaggaggagcaagccacatcttacatggatggcagcagacagacagggagagagagcttgtgcaggggaactcctctttttaaaaccatcagatctcgttagacttattcactatcaagagaacagcacagaaaagacctgcccccatgattcagttacttcccaccagatccctcccacaacatgtgggaattcaagatgagatttgttaccatatcagttaccaacccttccagataaatcacgtgaaatatcgccattaacagagtgagctcaggtggttcttcagtgcatttctgatacctgaaccttccctgggaatttcacagaccatcaggctctccaccctttgatagcaggatagcagggcccaggttctgcaggaggagatgttaccacaggcctgaaagggagggaggggcagatgctacaggaagatgctggctctggattcgctggaggagctttcaagggaagtagatacacactgtctccatcatttcatgtccatcacactctaaaatgctttggacaagaagcaaatgttaaagacaaatgtggcccattttcctgtacaaagagggctgctcccatgccaggctattggcactggtgggcatgaggcttctctgctgccctggccggggggttctctcactcaccattggctctctgacacctggagagaccaccacccttgggctttcatgatgctcacagaatccacactgttggagctttaaggagcctggatcaactggaacaggcagggagtactaggacagcccagcattgccccaaaatatccaggcctgataaaagagaaaaacaggtagctcacaggaaaaggataaaaaaaggaggagggatttaacatgaaaaggtgcttgatctccctcataataaaaagactgctgattccatccaggcaagtgacagaaaaaaaaaaattaatttaaaaagactgctgataaaaccacagcgagacactgctgctcagggatctgagggtgtgggcagccaggctgccacgcatcatgggtcggagaggaagaccacacccctggagcagagggcggctgatctgtcagatgccctttgacagcacctcagcttccaagaattaaccctttctatgtgagcagaggcatccatggggggacacactggtgaatcatctgttatgtagaagtctggaaaacatcaggatggaactggtgaaataagtgtggcctctgacggaatggagcggtccgtctgcactgctgcgggtgcccctcagatcctgtgggtcagtgagaaaagcagtgaggaacaaggcaggtactgtgtactgtcctctgcgtgcaaggaaggccagcgcatgcaacagagtccacacagacatagcctaactctggaaggaagaatgagaatgcagtttcagtggtggcctctggtggggagaaactgggtgaagggagatgtcatttccatttctctactattaattttgtattaccatgcttaaatgttactttttacctttttttttttttttgagacagggtctctctctgttgcccaggcaggagtgcagtggtacaatcatggttcactgcagcctgaacctcccaggctcaagcaatcctcccacctcagcctcctgagtagctgggactataggcacgcataccaccgtgcccagctattttttttaatcaagatggagtttttctatgttgcccaggctggtctcaagctcctggactcaagcaatcctcctgcctcagcctcccaaagggctgagattaaaacgtgagtcaccctgcccagccaattgctttttaaaaaagattaaatgcatgtatacgctcaggcatcagcacacttggaaaggatgaaaatatccggaagaagggttcttttaaaaggctcctcaagtgatgctggcaggcatgacgaatgtccctggtcacaaaagctctgatctggcctaaccctgtcatgttagagactggagtgcgtgtgtgtgcgcgcaaagtgtggggggatgggggtgagtgtgtgtggtgtgtaagcatgagtgtgtatgtgtgtggtgtgggggtgtgtgctgtgtgagcgtgtgtgagtctgtgtgtgtagtgtgtgtgtgaagtatgtggtgtgtatgtgtgacgtgaggtgtgtgtggtgtgtgagttgtgtatggtgtgtgcatgagcatgtgtgtgggcatgtgatgtgtgtgtggtgtgtaagcatgtgtgagtgtgtatgtttgagcatgtgtggtgtgttgtgatatgtgtgtggtgtgtgagcatgtgtgtgtgatgtgtctgtgtgtggtgtgtgtgagcatgtgtgttgtgtgtgtggtgcatgtgtgtggcgtgtgagcgtgtgtgtgcattgtgtctgtgagcatgtgtgagtgtgtgtgtgttcagcatatataaggcatgtaactgaacacagcactttagagggctctcctggagtcagagggggtgggtaggaggagaagggaggtgggctagtgtgctgaagtatctactccttgtcatagtctgtgacaacccagactagcccatgagccaccctgttccctgcatttccaatgagacctcggtggacatgttccctgaggtgaggctgactgatgtcatttgacgatcttgatgccaaatccttttatatcaaaaacaaccagaacactctcttttctcttagtgctttcacccagatgaccacatttcatcctcccagccactctgggccaggtggcactgctggtttgaaagggaggtctcccctggagtaacttccgtgggcggattcacaccctgcccacagtcctgtcccagtcagcccaccatggtggtctccggttcctccagaattcccgcttttcagctcatccccacattcccggagggactgagagcgcagccccagggccctgctctttgggggccgtctctacacccagagaagcagcaaggcattcctaggtttctctttcagatgcagaacttcagtgttcagagatgttcccactggtcctgagagggctcagttcagctttaatgactgcgctgttgcgtgtgctctgcagagggcgggtggcccagcgtggctgactgcagttttcctgacgtggagcccgagcctgccccgctgtttattaattaaggatcactctgcttgcagaaccctgaactccccagaactgtgaggtgggagaaccccgagaggccacctggccccacttcccacctgctgcccaaaccccctctctgccttcctgacagtcaccccaactcccagtgatccccatcaaccatctgacaaggggactgagagggaagagaaaggaggggcccaaagaggaaggtaaaactgtcgggaacagcccccaaatgtgtgacagccttcagtggagttgcccactttcccttttctcctccctgcaggacctcccttctccccagtcctccccaacttctgaggttacattgagaaaagtctgcagagaggtgccagcatcacaaggtgttaaggaccacgagtttggcattttaacagatgccagagccacttgagaaatgtggtaactaagcccagagaggtacagttaacctccccagagtcacacagcaggttcatggcaaagctggactagcacaggtgtccttcccctgcagatccccttctgtgccccacatcacctccctccagtgtctgggccacctggagatgggccctcagactcacccggccagaggtgccatctcatgggagaggtctggccaggaagcatcgatatttgagatcccaagaaatgaagacttggcctgtcagatgacagacttcggtcatgggaacacgtgatctgttttacacatgcgtcccctcagcagcagctttccagaacattcccactttcttctgtagtgagaagaactctttccctgcagcctcctgcccaactcctccttcagtgtctttgcttcagtgtctttgataaaccattctgctttgcagagtgcgagctctgccttgcagggttcgcatctgcctgtgctgagtaaccaacgctaaggtcgagtggtcggtcacctctcataagagctagggttgtctcatgctgatgactaggacttgccctcaaggagaaaaataaatcaaaacaaaagcaaaaacagcaaacatgcatctcttaaagaaggctctgagtccaggtaaatttccttccactgaagcagccaggctgaattcgaattatctttgcccctgcttaaaaactaatgcaaattttcctagagaatatccactaattcctggagggggcatgggcattcctgatgcccatgagaggaccatttgctcttccctcagtatgctaaataacagaagcgacatttgttgctggaaagtatcagtgaagttaataaggtttttcttgcccagggtgagggaacagttcccaatgacaaatgctgtatgggaaggggctgtagaactgccagcccctttggtccatccgtaaagtgaactctgtggatcctggaggattccagcgtctttttttttttttctttttttttaagacagagccttgctgtcacccaggctggagtgcagtggcacgatctcagttcactgcaacctccgcctcccgggttcaagcgattctcatgtctcggcctcccgagcagcaagactacaggtgcgcaccaccatgcccgactaatttttgtattattagtagagacgggggtttcactctgttggccaggctggtctcaaactcctgacctcaggtgatccacccgcctcagcctcccaaagtgctgggattacaggcatgagccaccatgcccagccagcatctttcatttttctgtctgctttggccctttcctctctcactgtcttccttttccatttccaaagtcagtccatctcactattagcacaaaaactgctagagcgcttgtcattggtcatctctccctgcacctggctggtctgttcttggccactgaagcgtttcccccagctgttgctttaatcattttattgttattatgccttacttaagaaatggatatgagatgcatttacctgtctcttcctgccactctgcagagccagtaagatgtggtggaaagggcccaggctttggaggagggctggctggggttggatcttggctgccccctactagctgtgtgaccttgggtaagtagctggacctctctgagcctggttcggaatcatagcacctctctttcagggctgctgtaaggaatagcagtggtgtgtataaagcagagcgcacagccagcaactggcccctagccacactgctgagcacctactgtgataagctgccattgtggtgtgtgaagcaaaggggaaacatgcctgctgtagtgagcttcctgtagggcaggttgtagaaccagaggtgggttccaaggttacaaagggactcttagtgtattagtctgttctcacattactataaagacctacctgagactggatcatttataaagaaaagaggtttaattggctcacattggctgggtgcggtggctcacgcctgtaatcccagcattttgggaggccaaggccggcggatcacttgaggtcaggaatttgagaccagcctggccaacatggtgaaaccctgtctcttctaaaataaaatacaaaaattagctggccatggtggtgtgcgcctggaatcccagctactcaggaggctgaggtggaagaattgcttgagcccgggaggtggaggttgcagtgagccaagatcgccccactgcactctagcctgggcagcagactgagactctgtctcaataaaaaaaaaaaaaaagaaaagaaaaagaattgcaagaaataaattattgtttatgagctatatggtctgtggtaccttgttgtgggactgggagtcttggcgtctccctgaccctgcctgttgctgcagcaccgctcagccctgcctgctccctacctgcctcccctcggcctctcctgcctccaccgggcccctggtgcctcctctagagacagtcctcctgggaccgattgtgttctcacttacacgaggcatccaggactacagataaccagaggaaggggcgccccccccgcctgccctcctccctggcatcctcacgctgcagaggtcagagcctcatcccagccccttacctgcccctactctgtggagaaccgtggtcagttcgccaggccggatccacgaacggccttgtggaagatggtgagctcacacccagagctggctccgatgaccctgtctcctttacatgtttctaccttcccctccctaccttcccccactgctgggcgcagagtggaggcagatgaggtttaaagctcagaagggcttaaacgggttggggcgcagtggctcatgcctgtaatcccggcactttgggaggccaaggcagaggatcacttgagcccaggagttcgagaccaacctgagcaacatagtgagaccgcgtctctacaaaaaataaaataaataaaattagctttgcagggtggcatgcacctgcagtccctgctactcagaaggctgaggtgggaggatcgcttgtgcccaggagtttgaggctgcagtgagctatgctggcaccacagcactccagcctgagtaacagaatgagatcctgtctcaaaacaaacaaacaaacaaacaaaagaaggcttaaagggggctccaggtgggcttggcagcacaaagctatgaagttctatcttagacacaagttctgttactgggcctttgcaggctggcctgggtacctggctgccatagacagggaaccttccagatgagctgcaggcgtggagcacaggagccagggtgctcttcctgggctctgtccacaggcagaacgtacacagtctttgtacacgtccggcggctctggtgcctatttttgtttgtgtttttcttttgtttggggggatggatttggtttcccccgagccctctgtcctcctgtcacctggctggtgctcggcaatgttgaccagctgcctggctggagttggcagtggctaaggctgtgacagctaacatgttcctgagtcctctcatttcttcaccataatgccctgttgagtttgcagatactgtctctgtttttatctcccggggaaactgaggctcagagtggctaggccaccttcccatggtccctcagctcatgagggccacacagggcattgcggtggccttctcctcagccttgaccctccggccccagcattgctgcctcaaggggtctcctctgctgagccgtgcaccttctgcctggcagctccaactctgtggctgtgttcagtggctcagcactgccccttgaccctccctggccttctgcggatgccagactggagcactctgacaaggtctggggtggttgtatgggtcctgtgacctctatacacctcccagtgcctgggaatcctgcagatacaccctccttagccgtccctaaccatagaggacatttctgaggtccccgagagagtggggcacccctgcaggatccaactgctgggcccaggaaggatagcagcagcatgaggggttccattagccacaaactcacggcatggaaccttcacccacctcgcccctcatctgctgtttagcacctggcacgccgtgtatacttactgattattacattttaatggcaaattatagtggcaaacgtatgcatctttgcacaattgttgtacagcatgatgaacaagtcattaatagtaaagaataaatgtgaaagtgagaaaaatctgactgccaaagtttttactccttccttccctccccagacttttaaatgaaagtttagggataatcccttagttgtcctgctagtaggacttgcaattaaaagaattgggccaagaacacttctacgcttctccttttaggtttgggtgtaaattcggggtatttctcactgatgaaagcctggtgcagggcagaccgtgggaagctttcatttccggaatggaccatcaacatcccttggagaagaattctcttctccagacccagacctggtgtcctggcacccattgggcaagtgggtcctagaagacaaacctggtcagagcctggaggctgcttagcattccccacgcacattagcagctcggagagctcaggaagccgcagcccctccttgcctcaccagcctggatcaggacagcatcccctggaagacacacagggcctggcctctgattacccagcctggagggaaagctcaatcgagcatcatgtcacccggtgcccccatgcagggtggcactggtgagacccccaagccaatgataccacctcacaggagtgcaggcccattgtggccagatcatcttgacttttcaagataaatcagaaatcgtatttccatgagatatccctatttgcaagtgatggtgactaaattagaagtttttgaatattgtaacatgttcgtaggctgtttgtctggtttaaactctatctggaggaattcaagctagacttcaggaataacttcttgaggcaaggattttgagaccttagggaaagaaggacgtcttgggggtattctgactgttgtcctcctggaagggaagaacagagaactagaagactgcccttagcgaagttcaaagcacctaagcccgggaccctcagcaagtgttcttgagtcacagattctccctgaggcgcctctttctggctccatagaatggctgattctgtaactcggtgagtttgctttttttttttcctccatcacccaggctggagtgcagtgaagctggagtgccgtggagcgatcactgcaacctctgtctcccaggttcaagcaattctccttcctcagcctcccaagtagctgggattacaagcatgcagcaccacacctggctaatttttgtgtttttaatagagacggcccgaagtgctaggattacaggcatgagccaccgcggccagccataactctgtgactcttgttacaaaggccttatattttgctctttgagggtggttttggtttgatgcctgttggttgccatcttttaactagggatgttttatcaaaatgcccagccaaagtgtccaaacaaattataccttaaagtttgaaaatgtctggcacttctaattcaatgcctgttgtgccaggcactgggctgctgaggaactgagtcccgtccctgcaggctagctagagaacacacacacacacacacacacacacacacacagagtggtcttacaagtcagttttatattctacctatatgcaataaaggtattattatgttgaggtgccttgatataaaaatttttcttaaaggagaggatgcctaaaacaggcattacctgaaacctcctctctccagcattggttgtcttctgtcatgactcagggttttcactgagaatgggatggaaatgtggtctaaagatagggccaatgttgggactggatcccctctgggaagtcagaccaggctagggcaggtccttgaagccatcaggaaaagcctctggagccagaaacaaaacaaaaaaaaaatggtgttaactaaactcagtctcaaatcctgaataggactcaagtcaagcaaaataattaaaggagttagcaaagggcaagtcagagagaccgagcaacaccaatgtcttccgggagccctgtggcgagtgacagagcctggactctggagtagaactcatcttgtgtcttcttctgccactcgttagctgggtgaccttgagccaagccccttaacctcttggaccctatgttcttatctctaagtaggggctggtaatatcttcccctttgaggaatgccctctaaggggtgttgtgaagattcggtaaggtggcaggggtaggactcctggccagaaacaggcacataataaatgctaagtctctccttctctccacctgctggatgctgtagatactaaggatttcgatgtgaatgagacaaaacccctgccttccaggagcctttgagaatcagagaactagacccatttccagaacaaggggatgcagggtctggataaagttttggggatcaatagagcagagggctcccagaggatcccatagggttgactcctaactcaagggcatgagacaacccccaggaagggcaccctggaaggggtccggctgtccctgatttacttgtgggcactgggggaatgcccggagccatccagccctcagggctctgtgtgattctgggttcctcccataaaagataatcagattctttcacgttaatgtctttctccacctcattgcacatcatgcagctattcattgactcagcaagtatcagctttgcatgcgaccttggcctacccactttagcttttagtaatagctcccttcttgaataatacaaccagtggggaaacagaacctaactcttacctctgggaggcttatttgctttgagaacatatgtcctgcagttttgttcatatggcagtgaagtttcgtgcacacactctagagccaggcagcctgggttcaaagcgcagctctgccaggtcctaactgcatgaatttgggcaagtcgctcaacctctccatgcctgagtttcctcatctgtaagattggagcaatggtaatacctgctttttagggttgagaagagaattaaatgaattaagatgggtaaagtgcttagagtggagctttgcaagtagtaagtgctatgtaagtgttcgatttaaaatgaaagacccttaaatacattctttgttcatttcacaagcccttcatttcacaaccttacatttcacaaccaagctctgtctcccctggaatccagccataactctgctcacaagtgtgagacaggccccagcagagctgcacgaagaggagagaaggcagccccccagactcccaaccccctgtccaagatggcaaaaccagaacacagcctctgtaccaccccagcaggtattcagaatctgcaatctccaaagcccacttcaattgtaaatgtagagccacgtgcgctttaagtcacctgtcactctggaggctcttttgctcagttcctcaccattagcagggatgacagggagtgcaggagtgcggtcgactcccagatattggagagcgctgggctagctgcccattctcccggcctccactcctctttgctgtccagccatcacttgctctttgaaggcaaacaaaacagaaaacagtgccaaaagtatgggaagaaagccagcttctcccctggggtgcctgtgatgccatgcccaccctccctgaccacgcagcccctgtggaccctcagggccccaagcccccatttccatcacatgcgtacacccatgtgtgtccatagccgcccatctcagtcaataaggctgctcctgcccacttggaatagtggtgacaaccaggagtggcttatgggaactatcccaatggcctgacagcatgtccgctgcaaaccgctgaggtaggacactgccctcatgtctagctgatcagcaagaggcgcagttgctttcttaggtaacattgctgctgtgtcctggccattgctggggggtggcacttaatctacaccagaattttccctcctgtatcttccaagctgcttggatcttggtgctgaattaggttggactttgtcttgtggggaagggaggactatagaccctcaacgtaagcaatggtcagactattctaagaaaactcgccgaattaaagcatgaggtaaatttagttctgacttctgtccaccccactgccactgtccccttttatcccatgatcccttgcttttcttttcctcctctctccctatctcttgtgtttgacgcatgataggaattcagaaatatatgtttgtggatttgtttattcacgtagcaaaccatttcttgagtgcctaccatgggccaggtagaatgggcggccccgggctgcagtggtttcttcagcccctctccagggtttacactgtgcaagacggtttgtgatgggtcctcccatcgaggaccacactcttctttctctgtgccccttggtcctcagtctctgaccccacttcaaaggcagcattcactcagggaagctcccatacaatgctagtcagagtaaaagtttggacaaattgccaggaagcagcttgtcagtatgcataaacagcctttaaaatattactactctttgacccagaatttcacttctaggaatctgtcctaaggaagtagtcacatgcaaaagatttatgtaccaagatgttcatcaaagtgttgttttataacaggaagtctcagaagctggataaatatccaacctctggaaatggttagatagaatagtatgtagccattagaaaattatgtctatggggtttaaaatgtcatgggaaaacacttctgacataaaagagcatgagaactgtatatttagcataatcttaactatgttttagaatgcacaggaaaaaaatgtacaaacatattcatagtgatgtctctggtggtaggattatgatcagtaagtacttctgtctcttcatattttcctgtatttgataatacatgcatatgttgtttttaaaataagaaaaattttaagtttaaaattggagctgaaaagtgtttttaggtcaggcgaggtggctcacacctgtaatagcaccactttgggaggctgaggcagtcagatcacttgagcccaggagttcgagaccagcctggccaacatggtgaaaccccatctctactaaaaataaaaaaattagccatgtgtggtggcacacatctgtaatcccagctacttgggaggctgaggcatgagaattgcttgaacccaggaggtggaggttgcagtgagccaagatcgtgccactgcactctagtctgggcaacagagtaagactctatgtcaaagaaaaaaaaaaaagaaaagcctttttaaacagtagcagacataactatataatccttactaagctgtcggtcaaatttttatttatatatttattttattcatttattatttttagacagggtctcactctgttgcccaggctggagtacagtggcgtgatcatggctctcttcaaacttgacctcccgggctcaagtgatcctcccatcttagcctcccaagtagatgggaccacaggtgcataccaccacacctggctaattttttttattttttatttttagagatggtgtttactatgttgcccaggctagtctcaaactcctgggctcaagctatcctcccacctcggcctcccgaagtgctggggttaccagcatgagccactgtacccagccctcaaatttttaaaaatctataagagacattattggacaattagagaaattcacatatggacttataatagtatcagagtgtgtggtgtgatggttctggagggaatggactttttctttggagacaggcttttctatgcccacccttttatcttgctaacttatcatcatccaggttccagcagaaacattacttcccccaggaaatttcttaagggtgcagtatcatgatgtctgcagcaaattctcaaatagctcaggaaaaaagtacgtgtgtggtatgagtgtgtgtatgtatgtgtgtatatatatacacatatatacacatatatatacatatatgtgtatatatatacatatatgtgtatatatatacacacacatacacatatatatacacacacacatacatacatgtatttttatataattatatatgcagagagtgcaaatgttgccaagttaaagattggtgagtctaggtgaagggaatatggtatttattgtattatttgtgcaacttttcttaagtttgaaaattttcaaaacaaaaaattggaggaagaaggcatgccagtctaccccaagccctccattggaatgctgaaaatctaaacaatgtgatttggcaatttcatttcttttctgttgtgggccagtagtccttagatgttggggaagggggtagtcgctgaggtgtggttgacttaggatggaagaagcagaagtcaagactcccagggtcaaagtggtttgctctgctgacccaagtgtgggaggcccagagtcagcgtttcaggtgtgctaattcagcatggttctattcacggccaaagtccaccctgggcacctctctggcagcaatcttgggtgactctactaaggccaggcctccatgaccctatgtctggatcccatatctccacctctcccactgtctcaggaacggtgcttagctttttcttttccctctcctgtcttctttgccagcatgtagaaagtttaaataattcccctctttacaacaaaacaaaacatacccccttcagtcaaccaccctagctctcttctccttttcccagccagatttttttaaaagcatcctaggccaggcgcggtgactcacgcctgtaattccagcactttgggaggccaaggtgggtggatcacaaggtcaggagatcgagaccatcctggctaacatggtgaaaccccatctctactaaaaatacaaaaaagtagccgggagtggtggcaggtgcctgtagtcccagctactcgggaggctgaggcaggagaatggcgtgaacctggtaggcggaggttgcagtgagccgagatggcgccactgcactccagcctgggtgacagagtgagactccgtctcaggaaaaaaaaaaaaaaaaaaaaaaaaagcatcctcagcactttggcaactccatctcctcccaacatgtccctgttactggaatccagccaggactcagccccgatctttctactctaaccagttgtctcagttaacaaggacaggtttatgctgcagtgacaaacaagatcccaaattcttgtggcttcacacatctggcaccacctcatcttccagccttaggagtcatcttttagttccttgaaaactctttacagttttctgttggggccttgtcatatactattcccctggaatgttctttcctatcccctccctttcaccttgctaacttgtgcccatccttcaggtctcagcagaaacatcacttccttggggaagttttctccaacacccacactacacaggtgtcccatctacactcctatgactttgtggtacttgtctcacttcattttccactgccttccccacaaggcacctgcacaagggcaaggaccgtaccactgtacctatgtcactcattgctgtggtcacctgcactctggctgcctaccttaactacacattagaatcacctgaggagcttttaaagccacaatgcaagactccaccctaggccaattggatccaaatccctggggtagggccagacatcagtggagttatatatacatatatatattttgtttgtttgtttgtttgttttttgagacagagttttgctctgtcacccaggctggagtgcagtggcgcgatcttggctcactgcaagctccgcctctcgggttcacaccattctcctgcctcagcctcctgagtggctggaactacaagtgctcgccaccacgcccagctaatttttttgtgtttttagtagagatggggtttcaccgtgttagccaggatggtctcgatctcctgacctcatgatctgcctgcctcatcagcctcccagagtgctgggattacaggcatgagccactgcacccggccatcagtggatatatttttaaagcactgcagagaattctgttgcatcagcttgagaaccactgatctgccttgtgcttcacatttaaaacttttttttaatgaataaataaaccccaaaaaattaatctccctaagcctccctagaagataggatggtaaggatattttcctaggtaaaaatatgttaatttcatatttcatgaaatttcatgtttcatttcaatcaagctctgtcatacaccttacatggggcaagcccagtgcctgggcagggtgtaattatactcattacacaggcaaggaaaagtcacattaggtgatggagcacaaataggcagttaatggtttcagggctagttaggatatgtttgtctttcaattgcaagtaatagaagcccaaagaaattggttatttatataatataattgattggttcccaaatttgaaaaattcaggaatagacccagcttaggtacagctggatccagtcactcaaacaatgtcacaaagaaccctttgacaggaatgtatcctgtgttgactctactttgctctgagtagtctttccccaggtgatgataaaaatggtcatcatcgccaggcttgtgtcctgtttagtaggaatatacaagaagagctcagtaaatgctggccccaccactaagcaaaaacaaaacttttgttgttgttattgttgttttaaataacagcttagacctttcttctttccttgttattctctttcatctgtaatccagttttctacttctgaagtatagaatgttctgatgatttattcttcattacccacaacttgcacatgtttatttaaaaatgccaggattgcctggccgttgtgtgctgttaacctttgtttgctgttagtggatccctgaagttcaggctcccaggggagcagataatgggtatccagttcctgcaatatccaccctctggcaagccaagttccttcctgggtaaggttttgcctacctgcattcctagggaagtttctgggcctgaccaccaagccagctctgagaaggggtgcataagccccaccatgctttggctctgtccctatagaatattttatgttgttactgaaaactaaaggaagatgggtgcggtggctcatgcctgtaatcccagcactttgggaggccaagacagattgatcactcgatgccaggagttcaagaccagcctggccaacatggtgaaaccttgtctctacaaaaacaaaacaaaacaaaaattagccgggtatggtggcatgcacctgtggtaccagctactcaagaggctgaggcacaagaatctcttgaacctgggaggtagaggttgcagtgagccgagatcgcactactgcattccagcctgggtgacagagcaagattctgtctccaaaaaaaaaaaaaaaaagaaaaggaaagctaaaggagagagactaaaatgatatcaggttcctggagaacaaacagacatgattttgcttcatggcaggacagccggaagaagtgggattatatcctcacattacaaataagaaaactgagactcagaatggttaagtcacttgtcccaggccacacagccagtaaattacagaaacagaatttgaacccaaatcttccagctccaaagcttgtgttcttttcactacctcctgcttaattttttaatttctaagattagacccttcatctatccatgacacctgcctgtcatcccctgaaaaaaggtgaacgccgttcagaaatttttctagcctgagctcactcccagttcacttatttttgctttgtcatggctgcccagtccccacttgtagaccaggaataggtcatggctgcggggactacacgctgtcgctgctgcaagggccggcctctgtttccggggctgagtgggggccagacctgccaggagcaccatcttctgtgggtcctgcctggatgtcacatcccggccccaagaagtcactgcaaaccttcgtattattgagcttcacatcctagaatttgctgtcactgtggctgctgcatgaagttgtcctgagagaaacgggcattgtcattaacagggaaattgatggtctgggggaaaagtcatcctcattctcttgcagatctatgggtgattgagactggctgatgttgaaggggtttctcagccatcgtgtgccatgttatggaacagtggtgtagccagccatttgacacccagcgctgacctttgtttaacaacctcacctatatatgacaaaatgattgtcagaaataatcgtgtaatgaaatgactgtaataatggccagaaaagaaacgcagatagtaaaatgtttctcttgttgaactctgtacatataattgcaccaggatttttttcaaataaaaagtaaatattatactacaaaaaagggaaaaagcacaagcatttattaaatagctttctatatctttctgagttttgatcctttgattgcagactgatgtaatattttatgtaaatcattgcttggttactaagtgaactttaagaaaagtgagacgtctgcagaagttgcccataatttagcagctactgtattgtaccattgatgtacggctttattttcttgattaattatttaaacaatataattcacaattttaaaataataaatttccacttaaaatggtatttaaactcagcaaaatatatcatctatgagtaaaatttgtatttaccaagcaaaaatattacagtttgtggttcacatgctgtctcactgttttaaattttaaatacaaaaactccaagtaggctgggtgtggtggctcacacctgtaatcccagtactttgggaggctgaggcaggcatatcgcttgagttcaggagttcaagatttgcctgggcaacatagtgagatcctgtctctactgaaaacaattagctgggtgtggtggcacatgcctgcggtcccagctactcaggaggctgagataggaggatcacttgaaccctgggggacagaggttgcagtgaggcaagattgcaccactgcactccagcctgggtgacagattgagaccctgtctcaaaaaaagaaaaaaaaaaaagaaacacaaaaactccaggtggtcgcacagaatgacaggactgaagtaacttagctccaatttctgtcttcataatcactgtcctaccattgtctgtgcttagaatctacttgcttaatgcaggaacatgtgttctcacagagatggaaaatgcaaatggcgccagaagcaagctggaaattctgaaccattaagaatttactctctgccaggcacggtggctcacgcctgtaatcccaggactttgggaggctgaggcaggcagatcatctgaggtcaggagttcaagaccagcctggccaacatggtgaaacttcatctctacaaaaatacaaaaattagccaggcatgatggtgggtgcctgtaatcccagctactcgggaggctgaggcaggagaatcgcttgcacctgagaggtggaggttgcagtgagccgagatctatctgcaccattgcacttcagcctgggagacagagtaagactccatctcaaaaaaaaaaaaaaaaaaaaagaacttactctcaaaataaatacgtgtggctgactccacatatggtagggccaactgtataactagaagttctccaaataacttctgtggagaaaaaaaagtttattaaaggttaacttttttaaagtgctaactagaaccttactaacactgagatcgcaccaattgtttataacttagacagggccgggtgcagtggctcatgcctataatcccaacactttgggaggccgaggcaggtggatcacttgatgtcaggagttcgagaccagcctaaccaacatgatgaaaccccatctctactaaaaatacaaaaattagccaggcacggtggtacacgcctgtaatcccagctactggggagggtgaggcaggagaatctcttgaacccaggaggcggagattgcagtgggccaagatcgcaccattgcactctagccccagcaacaagagtgaaactctgtttcaaacaaacaaacaaaaaaaaaaacctcttggaccaggaaaatattttttaagggaggagtattttatcactggcattgtttaggattgcaggcacatgatgctaatgaaaagcagactaactattagttggttttattactgtttttgaactctctctctcccttttttttttttttgagacagagtctctctctctgtcacccaggctggaatgcagtgactgcagtctcagctcactacatcctctgcctcctcagttcaagtgattctcgtgcctcagcctcccgagtagctgggattacagggcaccacaccaggctaagtttttgtatttttagtagaggcagggtttcaccatgttgcccaggctggtctcaaactcctggcctcaagcgatctgcccatcttgacctcccaaagtgttgggattacaggcgtgagccaccgtgcctagccctgtttttgaactctctagagacagtccagccccttattacttgtcctgaggcagctgctcccttcacctggccccccgcattgtgttccggacccttgtcctggtggtgctaaagaatatctctgtcgatcctttggggactggggaaactgaggcccagtgccacgcgatgccatttgttcagggaagattaggtcatctgctaggtccccagtcacttgaccttcttcccagacaggaagaagctgctctgggtctctcagtgctccacgtgtctttgcacattgaaatgttttctgattttttttttttttttttgctgttacatttacttttaaaaaataacaagcaataaaatgttacatttgagaaggttgaaatgagaattgatttgagttaaattctagcagatttttcttagaagaatgatatcatcatctccagctacctgcaattgatctactctgaattaagaaagagacttccatttgttgtttatattttgcactcttgatgtgtttctttaaattatggtcatgggccaggtgtaggagctcacacctgtaatcccagcaccttgggactctgaggagggaggatcactggaggccaggagttcaagacctcgtctgtacagtaaattttaaaaattagccaggcatggtagcattcacctgtagtcttagctacttgggaggctgagatgggaggattgcttgagccagaactttgaggctacagtgagttattttcacgccactgccctctagcctggctgacagagcaagacctgcctcaaaaaaataagtaaaaaataaattaaatttcaatcattagcagtcattaggatatttaaatacagtatgttgaatcaaagttacgcatgtgtgtatttttttttccagagagttgtttatcatgtgggttttaatttaactttaaaaaaatgttggctggacagttgcccaaatggtatcatcagccatttggttgagaacgtatgtcctgcgggctcctctgtcactggagttttgctagctgacagccactggctagttagagactgcagtcagcacagatgcaggcgtggacttgcgcacgtaaccatgtcaatgcaaagccatcacttcttaaaaattctgaaccctgctgtctgagatggtggtgcagcggatagaactctgctctaagaggcagtagctaattccatgtcttctttgcccttgactagctgagtgactttgcacatggggcttgcctctctgttgccttgtctgcaaagtggaatcatcttttccttgctagacagaaggtggaccctggacctatggcctttttgagtttcccccccgcttcttagaaggacctctgatcctactgagtttaatacccacgggttaataattgggaaaagcaaaggaagcgcttctgtttaggtaattatatgcatgtttttgtctttttctggctggaaagatatccaagccactgggaaggtccgtggctacccagggtagccctctctggggagggctgctatatccaagagcccctcatgagaatttgaaaatcgaccatggtagggcctgctgacttttgacagctaatggtgtgctgagaattgtccctccaaagatgcctttccattccctcgggagagtctgggcagcccctactgggggctgggatgctggctcttccctcagcctccaccccaactgctctcttccctcctcccctccccagccccctaatttctctcacaaggctttgttctgcagcaacctttcctaatgcagtcctggcctcttcgcagcttcattacataaccttccgtggactcctggtccaaggatcaccccagaaagccagtcagaggtaggcacgcagctggggtccatttacttaccttccccaccccctcggaactcagaggtggtgcaggaatttggactccaagaattaacagctccaccaccatcaccagagccaaaactcaggatgcatgtgcttcatctgctgcttatttccagctgagagccagtggtgccatggttccttagggagccggtcccctgatgccggctcctggccccaaatctctctgatccgggctcttccagaatgtcttgtctccaccatcgcctttgaccaatggtgtccctttgcctggtaatgtcccctttgcctgatgatggccctgtcactcctctctttagcacagaggaggctgtttcatcccttcaagcctgccctcccttcaagtcttagctcaagttcaccttctccgcagagccttctccaatcttcttgactacgtctcctctcagctccagcaacctctgtctctggcactgattccttacttagctaagagaatcacagacacttggggctcaggacaatctgctttctctcttcttacccatggccttggactgtgtgtacctctttgtctccactcccaaacccaacccccagagggcagagagcatgttgtctgtccctttgctcagcatgaagccatgcgtgtggtagatcggcagagttccataacttgtgttgaccgaggggtcactttgctctgaaattacccctgtgtccttcagtatttgcacagatagcttcctggccagaccgaatatatccaagggcatggcccacctctgctcctgtttccaggtccctggtgggggttagttcatgccttcctcataatctgcccactggcctggtcctcaaggtcttcccaactgctcagccagagttgagaaaatgggtcgctccatcctgtttgtgtcgttctctccttcctggcccactctcctgcccacaggtatccaggggctgcctgtagcattagaggacatacatgcacatgcgtgggcatgggacactcacgtagcctccaagcacagcatcaataatgcattctgtgctttatagcatggaaagctgctctaaactttattacacagtggacatgtctgaagcagctcccaaatccacccctgagtgtgttggaattggcaagcctatcacttgggagtctagtttttttgttcgttaataatagatgcttcctgtggccccagcttggcaattttgatttaaagtgatcttaactgaagagactaatggacgggtctgaatttgtgccttttaagcacaaagtattgctcttaattaactggattctatcctttgagcaggcagaggccttcccccaagggcgtcattaacgatccacatctggacatcttccaaagccttcttctgtttcaggccaaccgcaggtgtgttcctgaacacccaggaggctatgagagccacatatgcctcccaaatacacacagtgtgcatgcccagggacatagagcagtgtgcaaagtcccattccatctctctccacctgggagaggatggctcttctgtctgattcatggctcaaagtggtaaaggagctccccactccccgtcccacgcctactcagagtctgcaaatatgtatgcgatatgagagctcgtcagttagctgtcttcagtgtggcgcacatttgaggagtctgactcccctccagcacaggccaatgtgcactgctctcctatctttgtacccccactgttgcactgtgcagaggttggagccatagaagtaccagagctgtgaaaggagaggccccctctcacctctgccctggtctccatccccactttctctaggaagctagtaggtgctgacaggggagagaagggaggggaggggtccagaaacagtggctcatgcctgcaatcctagcactttgggaggctgaggcaggaggatcatttgaggtcaggagtttgagaccagcctgggcaatgtagcaagaccctatctctacaaaaagaaaaaatgtaattagctgggtgtggtggtgggcacctgtagtcctagctacttgggaggatgaggtgggaggattgcttgagcccaagagtttgaggttacagtaagctgtgattgcaccactgcactccagcctgggcaacagagctgagaccctatctcaaaaaaagaaaaaaaaaaagaaaggagagagagagaaagaaaagaaaagaaaaaaaaaaaagaagggaagggaaagcccagaagagtgtggggagaggaggcggccgtcattctggggccctcagtgtgcacaaccagataacacatgctctgtgggcttttgtaccattttgcttgagcataaagaaaggaaggctgcccctaaatagaaagcactctggaggcaaacaaatctgactccaatcctggccctgccactttcccagctgaggacttagacaagcaccctagcctcttggacattctcagagccatctgctgcaagtgggtgctgccatacccaccttactgggcaggcttgggggaccaagggtggtaaatggctcagtctttcatgatgcggccacacagcaggtgcgccatccaggtccatttctttccttcctttcccccaaatcaagttgtcattaaagtactagtccacattaatgaaatcaactgtattaattttctatttgctgctataataaatcatcagaaatttagtggcttaaaccaacacaaatgtattaccttacagttctggaggccagaagccctccataggtgtcactgggctgaaatcaaggttttggcaaggttgcggtcctttctggagggtccaggggagaatccattttcttcctttttccagcttctaaaggtttcatgcattccttggctcatgatcttctatagctatagtcagaaaaattttccatcaatcatcttcaaagccagcaatggcaggatgagtcctcacatcaccttgctctgacaccagttctctgcctccctcttccacatgtcaggaccctcatgattactttgggctcactctgataatctgggatgatctctctattttagagtcagctgactgggaaccttaattccatctacaaccccaattcctctttgccatgtacagtgacatattcacaggttctggggattaggacgagcctgtctctgaaaggctactttacatgaaaattcatttttttaattaagatttttttttcctcttgagacaaggtctcactctatggttcaggctggagtgcagtggtatgatcacagctcactgcagcctcgacgtctctgggctcaggtgatcctcccacctcagcttccctagtagctggaactacaggggtgagcccccatgcccagctaatttttttttttttttttttttgagacagagtctcactcagtcacccaggctggtgtgcagtggtgcaatctcagctcacagcaacctccgcctcctgggttcaagtgattcttgtgcctcagcctcccaaggagctgggactacaggtgtgcaccaccacgcccgactaatttttgtatttttagtaaagatggggtttcaccatgttggccaggctggtctcaaactcctgatctcaagtgatccaccaacctcagcctctcaaagtgctgggattacaggtgtaagccaacatgcccggccccagctaatttttaaatattttttttgtagagatggggttttaccattttgtctaggctggtcttgaactcctgggctcaagcaaacctcccaccttggtctcccaaagtgctgggattacagcatgagccactgcactcggccttaagagaagatttaataattaatactttacaacaagatctggaagaggtgggatgagtaactaaatgaggatacaagtaacccgggtcatatttgctaatacccttggtcacattgaacttgatatcttatcagattttcctaatcagctcctttagcagcagtgttgcagcatcttatctcattttgttttttgtttttttgcctagcacatgcctgtaaatcactggattgaggtgtttagatgtttgttgtcctttggatgcttcttataaatccatatttcatggctccctggaaagtgctatgcaaatgataagctgcaaggatggaaaggaaattgcagtgctcctgaattgtaaatgggcttttacgaggaggtttctaattactcgctctttctcttgaactgaggagttgaagtgtaggtggcagatccataacagataatcatgtgtgtgatgtgacttcagcctgagcgtcgaggaccaagtcacagagcaggaacagccactctccagtgtccttggggctacgtctgaggagaacctgggatttcatatatgacctgcactggctggggggctctcttgacgtaacgtgttccctctgagcatgttacagattctgacattcttatgttccttctgtggagagacatgtacttagtgacctaactcactttagcatatttttgctcatcgtttgtgtagcttaaaggaatcagataattaccccctccccactactttcggaagcacaaatgcaatgccctagaattgtactggggactcaaaaagaaaagagagtagtaaaatctattaaaggggacaaagacagcctatatactacaagctttctatttttatggcagagaatgccattttctaagtaaacagagaactgcatttgacctgcaatatcaaatgcatggatttgatgctttggaaagcaactgttttctgcgttaatctgggtgtcttccgtgaaatgtcctcctgcctttggcttaaacactagctttgtctacagccattccatcctgaacctgcccaatcttgtctgaatcctggtttcaccactgacaagctgtgtgtccttgggcaagttacttcacctgtctgtgcttcagagtcctcatctgtgagttggggaatctggacagaatctaccccatagggcgtagtgaggatgtgttgaattatcccaagtggctacacagagtaagcactcaaatgatgtcatcgttgtcatgattgctgttaccagagcctagagttcattctgatactcgagtctgtggcccatccagcccaggtaaggaatagttggaggagttgggcatgttcagcttgaagaggagacgacaggggatatgggatagttgaatctgtgaagggccccctgggatgaagaactggcatgttctgtgtggctccagggcactgagcaggacccatttgccaaagtctcagggacacagtttctagctatagacagaaaaattttctgtcactcagaggatgaaaatagaatgagcccccttaagaggtaatgagctccctgtcattggaaggattccagaagagctaggtaaccactttaggtgctatcaaggggcttttttctttaaagtcctttccaaaagcttctgagattgcataaacaataggaagccatcttggtgctttaacacaaactctccccagtgatgagggttgagccaaagccagattggcaagcagagaggagacttgtgtacaaggagttcctcgagtcaattgctttttccttgttctagccagccagagggctcctgttggaaaacaggagaccggagaggctgaggcctgaccaaaccagcttctgcaggccagctgggaggccacaactcctacctacgggaaaactgaagggcatctctatttttagattagcaaaagaaaataaatttaagtttgagtctcctttgcaacttttaaaagacatctttattgagatgatcattcacattctataaaattcccccactttgagttacaattcagtggttttagtcttccttgatgattttgatggtcttttcttaaggctcttggaagacccagaagcctctcagacacaggtgggtgtggagggcgtagcacagaggcagacttctcatttcctgggtctcccctttaatgactctcagagacccctccttccccctgcccctggcttctaccccaggggtgtagagttttgccattttccaagcagaacttcatttcctcttctgtgtctacactctttgtgcttctttcttgccagctttttctcctttgcccgcccttccttccttccttccctccctccccccttccctccttccctctttccctccttccccccttccacccttccccccttccccccttccctccttccttccttccttcctgcctgccttccttccttccttccttccttccttccttccttccttccttccttcctggtatgtgactaatttctgtttcaggacataaatgttgtccaggctgttctttggtctttctgttggataatggacatttggcattgagagaggctgctttttctgaaatcatgttcttggggcccagaacctaggtgtgtgcttctgactttgttttcttcctgatccaaattctgatatgtccatttaaattgatctagacccacagggcactgtgggacagatcctcagtggaacatgactctgtaacgagagcattttgttttgtcaaaatgagaacatattattgcctttcatctgattgtaaacataatacatgtttataaaacagtataatgagacaaaaatgtagacactaataagggaaaatctccctaattgtatttctcttcacagagaaagcccctgttgggcatatatactctagtttgtttatttgtttgactacacatatatgtattcttttcttatgtataaaaattctgaacatgcacatttctgcaactactgttttcacttgatgatgcatggacctctctagagtgtacgtttcttcttccttacaaagcagttggcttcgcccagggtgcaccaggacacggttttggctctgtccccagggtgtcacgggaccaggggatgatctcacagggtctgccatctgccctgcctggccggaggctgcatcgagagggccaaggggcaccacgtgtcgtgggtactgtcaaacaagagccttcagagccttccacagtctttcttttgcttcccagcattgcttccccgctggtggactctgaatctagaactagctccaggcgcctctccaaattcagacgggagctggggcactattataatgcaaatctaggcaaagccctcccaataccaggatccagaatggggtggggccctttgccctgaaaagctgtttagtttgaaaatacaaacaggagacagaaaagtttggctaaattaatggataaagttttaacgatggtaaccatagtagggttcatcgacagccagcgatggttctgaacacttgacatgtattaactcacctaatccccacattttacagacaatgcaaaggaggctctgggaggttgagtgacttgccccaaagtcgcacagctcctaagtgaaggattcggagtggactccaggcagcctggtctgactccctgcactgcgctgtgcttatctctggccccaatgccgccatgcagaagtgtctgggggcactttgtctctgtcagacagaattcggagatgtgtatgcttgccctggtatggcacttctctttttttgagacagaatctcactctgtcaccctggctggagtgcagtggcatgatctcagctcactgcaacctccgcctcccaggttcaagcaattcttgtgcctcagcctcccaagtagctgggattatagatgtgcaccatcgtgcctagctaaatttttgtacttttagtaaagatgttgttttgctgtgttggccaagctgatctcgaacttttggcctcaagtgatctgcctacctcagcctcccaaagtgctgggattacaggcatgagccaccatgcctggcagtgtggcacttcttacgtgtgttcagcggacactgtttatcttctgtccctccaagacggtgctgagctcaggtcgttcattactggcagacaactgctgatttccaacagaattgccatcctcttctcccctgcgactttcagagtgtgacctcagactcaaaaattagaagtgaaaacatcttaaaaactatcaccttttcttcctaatcctcctctcccctccctgtcttccttgttgtccccatctaatgaactatcatggcaaaaagagcccatttctggtcattttctgtggcctttcaaactcccacctaccccactgctcctgggtgcattacccgaaagctgagacttcagtgcagaaagtgccaggccctctgtccccccagatcgccttccttgtcttccctgtgcttgcctgtcacattgtgtgggttccagcgctggaaggaatgaggaacagattctctggttctccttttgaagtttaccttcgctccaccacttctgagaccttcccggaagttgccccttgtttctctcctctccagggctgccccagagctgcctctcacctcttcctgctgtcaccccaccaccatcagggcagaagttgggacaaagcctctcctactggctcctgcttttctcccttaggtccagcctcctcttctccatcttcaggagtctccttctccactcacacgtcatgacttcagcacctcgcatcagtccagaatatgactgcttgttcaagtgccacctttctcatgcatttttttctagtgacaatcacagccaccctgtggggcaggagtgtcatcatccccatgtttcaaatgaagaattgcagttcagagagggcaagtgactggcccagcctcaacagctagccagtggaccccaccagggcttctgactccagtccgggttccctttccacccaaatccatggagggagctgagccgagaacaggtgtccttcaggaagacgtgaagccaaagcctccacctccaaactcaggggcccagggagtccaggcacccatccactcacaaggctggatatggtgcattccaggagaggggttgggggcgagtggcctctctgtgtacccgtggggatagatgcgcaagtggcatcgccacatcgtgagtcctggcttcatgggtgagctccaggtccaacgagaagccaagcagggggcccttcaagctcagctttgggcccgggtcggggtacagggtagagcgggcctccccagcccctgccatgaggccaaggcagtgcatcgttcgcagcgtacattcagaaaccaaagcctaggagctggttatcattccggtttacagctgatggaagagcaggtgcttccgagaacccacagtgctctttggccagtgacccaagggtgcctctgagaggcctcgcagcacccggaggtgctgctgaggcaacgccctgactgtaagaaggaccattcatcctcagagagtggccgtgatgctgctgcgacagtcccaccatccctcccgactctcactcccaacagacttcccactgtaaagctgaactctccagcaaatcacctctcgccagactctctcctcactctctctgggtccactagaggttcctcagcctctctttgccttggttttcccagctgtaaaatggagcaaagagggcctatgtacccacaaaggtgtggttggagcgactcctcctacattagggcctcgagtggggcttcatgattggttggtggaggtctccaaacccacccagtgccaccgaaggctgagactgcagatgcaatgccacaggtgtccttcctcagcctgggcagctgaacatcatgtgtaaaacggggataataagataataacagccccttgcacctatgtggctgtgaggattaaacaagataaatgtgtaacagtgcctggctatagaaatatttactcttgttattaagggaagaatatgtgtggctaaaaagggatcgaagatgtaaaagccaatccctccccctctagcatatttaagggtaatgttgagttggtttgtggaccatttgctgcctgttagagctggaaggtagggaccccctctcaacagcgatgctacaaattatacccattggaggtcaaccaaaagacaaagcttattggctggacatggtggctcacacctgtaatcctagcactttgggaggccaaggcaggcggatcacttgagatcaggagttcgagaccagcctggccaacatggtgaaaccccatccctactaaaaatacaaaaattagctgggcgtggtggtgcacacctgtaatcccagctactcaggaggctgaggcaggagaatcactagaacccaggaggtgaaggttgcagtgagccgagatcgcaccactgtactcaaaccgaggcaacagagggagacgcaatctcaaaaaaaaagaaaaaaagacaaagcttgttaataccagcatattgttaagggaataaagtaggctgcagaacaactggtgtaatatggtgccatgtagggaaaattacatgtgtgcataggagaggggtctgcaaggttgtgccctaagatgttagagtggttcctttgcttttctcttttataattttgtatttgacttttaaataaggaccataaatcacttttataaaatacattctctccagcccctactactcctttaaagaataagagtggtttgcccaagaaagacagttttttttgctctggttttcttgattctgacatcagaggaaactgcttctcatccacttggggctctgggttcaggggattcatttcaggcagattaaagtggtgaccaggggcattcgtggacacagggagggacaggagcaccatcagtttgtctcacacaaccactgtcatcctcactgaaggctgttgcctgatcaaaaacagtattgggccaggcacggtggctcacacctgtaataccaccactttgggaggctgaggtgagtggatcacttgaggtcaggagttcgagatcaacctggccaacatggtgaaaccttgtctctactaaaagttcaaaaattagccaggcgtggtgggtgcctgtagtcccagctacttgggaggctgaggcaggagaattgcttgaacccgagaggtagaggttgcagtgagccgagatggcaccaccacactccagcctgggcgaccgagggggactctgtcttaaaaaaaaaaaaaaaaaatatatatatatatatatatatatgtcaaaaatggggtagtttttagatctatagtagttctaaaaacaaaggccatccaagcatgacagatttacaagcactattggctattccagtagttacaatggaggagagaagcttttagttaaaacaaacaaacaacacaacaaacccagaaaccttaggtcaaaaccaaaattgtcctctcagacacaatctgggaattttctcatgacagtgggcattagccaactgacatcagcagcaaccatccgtgtgcacacagtggcaccacctcctcccaaaaagcagccttcatctatgccctcatacaatcgttgattattctctttggattgaggcccggaattatttaagtttcttcttgccagcatgagtctttcctttctgtatgctccttatcttctctctttaatttggcagttctgcttgaaatctgggtctttcattagtagtagttcaatttggttccagaacattctgtggtgtgatgcaatgtgaccagagctcacacttcagagctcttcaagggccagtcttactgagcacctcccagtggctgcctgtgtgctgggcgccacttgtggtgggcaggagagaggaggggacacaaaaggagacacagctccttcttagaagctcaaagttggggaccagctgccacagaagagtatgtttagcatctgagacaccaagatccagcgtcacaagggtgtttattaagcctcctcatctctttctttttctttttttttttttttttcctcaggcagtcttactctgtcacccaggctggagtgcagtggcatgatctcggctcactgcatgcaaccaccacctcccgggtttaagcaattctcctgcctcagcctccccagtagctgggattacaggtgcccaccaccacacccagctaatttttgtgtttttagtagagacagggtttcaccatgttggtcaggctggtctcgaactcctgacctcagatgattcacccacctcggcctcccagtgtgctgggattacaggtgtgagccaccgcgcctggccttgctgttgattcatctatagtatgtttgacttgatgacctccagttaccttagacagaggttctcatctaagctccaactttccatttcctttgtcctcgtctttccccttaacccctccacatttctctcaaaatcaccccacttctaaaaaatactgtttatttttcttttaaatttcaaattatctatactcattgaaataaatcaaaatagcatggaataagcgaaaaaaatggatcccacccttccccactcccattccctagggctaaccatagttaaccatttaatgactaggtttttttgttgttgttattttttatttatttattttgagacagagtcttactctgtcacccaggctggagtgcagtggtgtgatctcggctcactgcaacctctgcctcccaggttcaagcattctcctgcctctgcctcctgagtagctgggattacaggtgcctgccaccacacctggctaatttttgtacttttggtagagacagggtttctcaatgttagccaggctggtctcgaactcctggcctcaagtgatctgcccaccttggccttccaaaatactgggattaaggtatgagccaccgcacccagccctcctgggctcttttcctttagttgcactcgctccccgctcctggagtagagggatttccgagagactgtgggctccagccttcacctaggcccaggactaggatgcctgccctaacatttatctttataccttaaagcaaaacagctggaccataagcattcaagaacaaactgtgaataaggagaaagttctcccaggaaacaagagctttagttctgttgggccagcccttatattccttagctgttaccagtcactgcttgatttaatctcggctatcacttggcctgacaggtctgctgctggtgccaggatgtctgggttttgaagcctggctccattacatacttcctgtgtgaccttgggcaacttactcaacctgtctgttcctcagtttccccagctgtattatgtcagcataatagtttgttgtgtgaattaaatgaggtaataactggaaatgcttcaaacatggttcctatcatgagaaatcctgctttccgcctaaatgtgctggaaaattcctggtggtgcagaacaggagaccagagcaaaggaaagacagggtgcagaagccaaaaattaccttggagaacaaagcgcatgttaaggttatttttggattctaggtttatctctgcttggtcttcagttacctgcaagagatccatttaggggatttttgtttgtttttaacgatagctttattgagatataattcatatgccataaaagtcactcttttaaaatgtttccggtatattcacaaggctgtgcagccttccctgtccttgattccagtctgagtttttaactgaagggataaggaggaccacgctttccccagaccagaaccgcgggccagggggcgattctgctgagtcaccgcgggcgcctggtgcgcggcggcggagcccgggaccttccttggctgccccctagcgagggccgcagcgcagcctgagacacccgccggggccgctccacggccgtcggatttagactggaagctcggtccaggtccccagcttgatgcgcccgcggtgtaggagaccagcccgactcgggcttcccctgagcccctggactcttgactccagcagggcctgggtaatgaacgtcagctcccctttcccaaaggggttgctctgttgggaaggcacccgtttgatacagtagcatagagatgggttttagcatcaaaatatcagaattcaagccttgctctctgcttactagctgtgtgaccctaaaaaggtttctgaacgtctctgagcttcagtttcctcatcattccttctcacggggtggttgtgagcattacagagatcctctctgtgaagcccctgtgagtggctcatcctgagggctgaaataaacatgttattaataatccaaaactggcaagggatgttgactggtccccctcccttgcccaaggagctttctagaacctgagttatcattaccaaactgtactgccttgagtaagaaagttagaaggaatgggaaggatggtggcaggtggaggaaggcggattggtcatcacctccttgcagcaagaaacagccccagatcgtgggaaacctacagacctgctagacagactaggagcaaaagctggggctttaagaatccccagggaggttctcctgagagagtagccagttggattttgtaagcagagatttgtttggggaggaggtgacaacgtagggagcagaggggcaaagctgtcgggaatcctgccttgagggcagggatgtgtgttggggggagttgggtcactggggctcggtggccttgggcaagtttctacctctcaggtcctttacccacctagggtcgccatcctgcccacctcacaggttacagtgagcctggatgcactgtcatgggcaggtgcccaggaaaatggcagacatgttccaaacagcacgcagcattccccagtgatgcccagggtcaccttggaggtgggcgagatgcctggggtttctcgtccaccccacaacacctcaggggacagccaaagctgtcccttcaggtaagctgcacagaagatgtgaactctgctgcaaagactctattctttgggagcaaaagggacccagggtctcacctgcacatccctgtccctgagggcctaggggttcttggaggccccagccttggcaaaatgaggaagaaggtgaaggttgtctgggcccctgccaggctccttcctcggccacgcactccccttcctgcacacacacccttctccctccaccccatctccattgttgtcagaaaagtcacaataaaaaggtccatattgtctagttcccatacttttaatttttaaaattttatttatttatttatttatgtattttttgagacagagtcttaacccaggctggagttcagtggcatgatctaggctcactgcaacctctccctcctgggttcaagtgattctcatgcctcagcctcccgagtagctgagattacagatatgtgccactatgcccagctaatttttgtatttttagtagagacggggtttcaccatgttggccaggctggtctcgaactcctggcctcaagtgatctgcctgcctgagcctccggaagtgctgggatttcaggtgtgagccaccgcactcggctccacacttttcacttattaaaagactgtggtgtccatcaatggatgaatgaataaaccaatgtggactatccctcccattacccaaggaatgaagcacggagccgtgccaagatctggattcacagtgaaagaagccagtcaccaaaagccacgtgctgtgtgacttcccttatacgaaatatccagaagagatacatccatggtgacagaaagtagatgagcagctggggactggcgaaggggagaagggggagcagctgtctatgaggtccagcctttcttctgggtttggtgagaatgttttggaactagatagaggtgatagttgtacaacattgtgaatgtactaaatgccactgaatcattcattttaaatcgttctttacgttgcatgaattttaagtcaatcaaaaacagttgtttgaaaagagaaaagcctatgggtagcggcagcagtgattggatttatgattcgattccatggctcatccctcccctgcctcaccccctcgccctccgacgtcttcttcttttactctgaactgttatctttgttctcatctctctctctctctctcaaccctgcagacacttttccctttctttgtctgcccccaccctccagatttccgtgtctccagtgtctccctacgaggcatgaattgagactgggagggtgtgattctgaagaaggcaccaacagtgactcagctagccccttcccccaccccgccccccgggcctcaatttagctaaaaaaccacagggacggactcaggaggcaatacctttccaagggtccctaaaaaatgtcccattttagtgtccaggtttcactcaactttagtgcctcccctaaaatgtgttccttacctcccaccccactgcatctaagtcactgcctgagaaaacaggattgaggaaaggagaaaggaagagagagagagaggaggagagagagagagagggaggaaggctgatggatttagaaaagaagaaaacaagtggtctgaggaaaacagccttggtgtgtttattttcctgtctgtgtatcgcttctcggccttttggctaagatcaagtgtattttcctgtctgtgtgtctcgcttagattacagggatctgtgggtgatgacacgtctggtccaggctgcgtagtcacctcaagggcatgcttattgatgtgtttttcaattcactatctttgcatgggagtcccaggccaagaggcacagctgcgccatttgtctgttggtttagatatcctttatccagttcttccagagaaatcatcctgcccttctggaggaggtgggcagcaggggtcagagatgggagggaaaggaaggagccaggtccttggctaggatgccagggtcccctgcctctcacctggcctgggctggaggcctcctgctgtcctgtcactgatcactaccccgccccagcctcctgagttagaagacacaggctaaagtagagtatttcttcattgaaaaacccatacaaaataaaggttcataaaaaataaaaatttagactgggtgctgtggctcacacctgtgatcccagcactttgggaggccaaggcaggtggatcgcttgagccctggggttcatgaccagcctgggcaacatagtgaaaccccatctctacaaaaaatacaaaaaattagccaggcatggtggtgcatacctgtggtcccagcttctcagcctatggacccacatagaatacaatgtcagcataagaagggagccctggggtcaccaaatggtttgggcggcaaagaacctgaaggttgagagaagtggcttggttacccagctgttggatgtgagacctggccactgcttcttccataccctagacctgcaccctgacatctcaagtaaaaagttgggggatgttttatggtccaggatgaaggaagggcagtgaggggcagcggagcatcactttgcatttctgtctgcctcttactggctgtgtgacctggggcaggtaacttcccagactcctgggaatcataacacctatgatgatgatgatgatgatgatgatgatgacacctacctcaaggattgccctgaagggtcacagagatgcctgcaaggcacctgcatggagcaagcgccccttctctggcaggtgctgggtgagcactacctgctgccaggccctggggctatggcactgcgtgaccctgcaagtcctacctggcgaagctgtcgttcttgtgctcagtcagtgttggttgtaagactgagaagagtcacttcattttgctctccagggacatctttctgggtcctattttctgcctatgtcaagtagcgcctcaaggatgctcctgaaaatgggcttgtctttcttaacatggcaggtaggtcccaaagcattagcatggggcagctgacctagcccagccaatgcagtgcagtgactcttgcaaccgagtctaatcagaaggtccatgaacctacgagcatttcctgtcccaggatcagggtggaggctgagcctccctgcttagagattcttcccatgcattccacttttttccccaaaagaaaatattgacccttgagaggcacacagtttatttattttgcatagtaaatagtagcctgtattttaaggatgagttgatttctgcatcagcccctgtaggtcatcagccttctattggtgcatctgactctctctagccctgcagggatggtggagggggaggggaaggagggatctttattggaaaccaggacagtgagactcattgccctgtcatctgctctgtggtgctgaatgaggcagcccaacagagaaataccctgagcgagcatccccagcctccaaaacagtggcgcattgccctgagtcctgggaatgacctttgattctcctgctcctgacttggaacccatggaaacctctagaagcagctgaggaaaacccaacatgaaaagcagaactccacactgagaatataggaggtgatcggaacatacaatgattcttgctaagaccgattcacagtttttcttttttttcgatcgaagaaatactggagaagcctaaagaaggagtctaaaaactctggcacgtgggccaaaactgtccttgagctaagaatgattttcacatttttaagtggttgaaaaatgaaataaaataagatgatgttttgtgacacatgaaagctatgggaaattcaaattctaatatctataaatagtgttttatcagaacacagtcatgctcatttatttatgctcgatggctgctttcccgctacaattacgttgagcagttacaacagagaccacgtggcccacaaagccttacaatatttactatctggccctttccagaaaaaaatgtgccgactcttgaccttaacctcagcaatttgggaggccgaggcaggcggatcgcttgagctctggagttcatgaccagcctgggcaacatagtaagactccatctctacaaaaaatacaaaacattagccaggcatggtggtgcacacctgtggtcctagccactcgggagactgaggtgggaggatcgcctgagcccaggaagtcgaggctgcagtgagctgtgatggcaccactgcacctcagcctgggcgacagagcaagaccttgtctccaaataaataaataatgcaaagtaaaataaataaaaccatataaaaaggaatcaatttaaaattataatgaaagctggccgggcatggtggctcacgcctgtaatcccagcactttgggaggctgaggtgggtggatcacgaggccaggagatcgagaccatcttggctaacacggtgaaaccccgtctctactaaaaatacaaaaaaaaaattagccgggcacagtggcgggcgcctgtagtcccagctactcgggaggctgaggcaggagaatgtcttgaacccgggaggtggagcttgcagtgagccgagatcgtgccacttgcagtccagcctgggcgaaagagcgagactccgtctcaaaaacaaaaacaaaaacaaaaacaaaaaaaaattataatgaaagccaaggggcatagtagaacaaattttctagagctcattaagtcaaatgagtcaccagttagtaaaacgcagtcacggggaagagagggcaggattctttgaagcagcggctctcctaaaaacaacccacccttgtccagctgccttccctcctgagggtgttccctttgactgtgtgacccccatcccctatttcccaaccgtccaagcccacctctagcataatacgagcttttaatccctctccctgaccccaacccgattttgaagcccagtctagtattttctcaaatacacttcttggctccattccttcctttccatcacctctgccttttcactgcatgcttggaccactgcagtcagctccctatgaacagttgctctctacccatccaatcggccccgcctgctgctgccaaattcaccgagggcacctctgtggtgctgcctgtggacaaagtccaagccagccacctcacccacctacaggtgagtggggagcagccagcgtgtccagtggtttaccccatcgccacagacttggtgatgtgtcgatgtgcagagaaggggtgttggcagccacaacacaagcaaccccgccccatgtgagatctaagatgggcgtgctgggagccacctctgagaatccaacagaaggcagaggggagaacggctcacacggcacaaacactccttccttttttttttttctttttcctttttgaaaggagtctcactctattgcccaggcaggagtgcagtggtgcaatctcagctcactgcaacctccgcctcctaggttcaagcgattctccagcctcagcttcccaagtagctgggattacaggtacactccaccatgcccggctaatttttgtgtttttagtagagacggggtttccctatgttggccaggctggtcttgagctcctgacctcaggtgatctgcctgccttggcctcccaaagtgctgggattacaggtgtgagccatggggcctagcctccttccatttaaatgtatgcctaatttgcccattgagaacggctgagacgcattttaagtggccagggtctacttagagttagtgctcatgaccaggcccaggtcaagcctggctggccagatggtgcctttgacctgctctgtctctgtgcaaaggaatgagctgaaggatgggggtgcagtgtgtgggcagtgggctggggctggcaggactcagtgactaagggaagagaactttcctcactaccagcctgtcttttcagggcaccgcggggggctttgggacttggtgatgaacacagcacagagagctgtccagcatgcgggtccctggcttctcacacttcccaggctccttcagaggctctctccaaagggagctgctctctctagaacccatgaatttggaatataggcaaccactgcattggggaccactgacctcaaacatagagaccagagcaaatggggctcatcacgtgaaactcatctggaactctagcaggttcttttatatatatatatatatatatatatatatatatatatatatatatatatatattttttattattatactttaagttctagggtacatgtgcacaacatgcaggtttgttacatatgtatacatgtgccatgttggtgtgctgcacccattaattcatcatttacattaggtatatctcctaatgctatccctccccactccccccaccccacaacaggccccagtgtgtgatgttccccttcctgtgtccaagtgttctcattgttcaattcccacctacgagtgagaacatgctgtgtttggtttttttgtccttgcgatagtttgctgagaatgatggtttccagcttcatccatgtccctacaaaggacatgaactcatcattttttatggctgcatagtattccatggtgtatatgtgccacattttcttaatccagtctatcattgttggacatttgggttggttccaagtctttgctattgtgaatagtgccgcaataaacatacgtgtgcatgtgtctttataacagcatgatttatattcctttggttatatacccagtaatgagatggctgggtcaaatggtatttctagttctagatccctgaggaatcgccacactgtcttccacaatggttgaactagtttacagtcctaccaacagtgtaaaagtgttcctatttctccacatcctctccagcagctgttgtttcctgactttttaatgatcgccattctaactggtgtgagatgttatctcatggtggttttgatttgcatttctctgatggccagtgatgatgagcattttttcacgtgtctgttggcgaactctagcagcttcttttcacaagttcatggagagaggtttcccactgagggaatcacatctgtctgatcaaaagaggcttgggaaatggctctcctgttcattccctgaaaacctctgatggaaccactgccactgtggcagccccagcactggcaccccagccatgattggtgccccagccacatctctgctgtgagccccagagccctggttaattaatcatccacgtgttgatggggagaggcccattcacaaaagcgacataaagcccagggagacgtggccgtggcaagaagggtgtgggactacattccgcccccaactgagagattcagaaaccagaaaaaaatggaaaaacatactgtgctcttgggtgggaaaactaaatatcatgaagggagcaatttttatagttttggcctataatacaattccagccgaaatcccagtggaactttgagaatttgcaggaaaaaaaaaaatgtctaaagtacatctggaagacaaacttacaagaaggtcaaataattttgaaaaagaaaatgatatctaagcccacctagagaataagacttgagatccaaagctaaatcaggaggctctagcaaaattgacagataagcaggacagagtgcatggtgcattcacctggggaagagggcagattggtctacaaataggcctgggtccactgactttagctgttatatttggggagaaacttttcaacctcactccatcttaaacctaaaaatattccagatgaattaataaatataaaaaattagaccactaaaaatgtagaagaaaatggatgatctttctataccatagagcaatggaataaatcacaaaggaaaacagatttgactatataaaacttaaaccctgcccatcaaaaaccatcagaaaccaaaataaaaggcaaccaactggagaagatagttgccacaaatatgatcaagggttaatgttattcataaattaagagcccacacaagtcattagaataagcactgagacctgaacagacaagcaaaaagaatgagagtgggtcggcgcggcggctcatgcctgtaatcccagcactttggaaggctgaagcaggcggatcacttgatcccaggagttccaacaccagcctgagcaacatggtgaaaccctgcctctacaaaagtcataaatattagccgggtgtgatggcacacgcctgtagtcccagctactcaggaggctgaggtgggtggatcacttgagcccgggaggtagagtctgcagtgagccaagatcacaccgctgcactccagctggagcaacagagtgagaccctgacttaaaagaaaaaaaaaaaaaaagaggagaaaaatgctgatctcactagtaattaaaacatcaggccaggcgcagtggctcacacctttaatcccagcactctgggaggctgaggcaggcagatcacttgagatcaggagttctagaccagcttggccaacatggtgaaatcccgtctctacaaaaaatacaaaaattcgccaagcgtggtggcacatgcctgtgatcccagctactcgggaggctgagacaggagaattgcttgaacacgggaggcagaggttgcagtaagctgagatcgtaccattccagtccagcctgggctacagagcgagactctgtcccagaaaaaattaaaacatcacatatttaaacaactctaggatatcatttaaaaaaacattaatagactgttttttagagcacttttaggttcacagtgaaactgagtggaaggtacagagacttcccgtatgttccctgccctccacgtacagcctcccccactgccaacgtcctgcaccagagtggtacacttgttacaaccaatgaatcctcattaacatatcattatcacccaagttcatagtttacattagtaaaacatcatctttcatctataagcacaaaaattttttggcatttatttaggtgtatgattaactcagtgttgacaagactcacacttcatacccacttgcactgcatctgagaagcaattggtgtctacagccgctacaccctcaacaagcccgatcttgtttgaaaagcaattggtgatgcttctcaaaattctatggacaaagtcagccgggcatggtggctcatgcctgtaatccctaaactttgggaggccgaggcaggcagatcacctgaggtctggtgaaaccctgtctctactaaaaatgcaaaaattacccaggcatggtggctggggcctgtaatcccagctactcgggaggctgaggcaggagaatcgcttgaagcaaggaggcggaggtttcagtgagccaagattgcaccactgcactccagcctgggtgacaagagtgaaactccatctaaaaaaaaaaaattatggacaaagtttttcaaaaagatatttaatgcaactttatttgtaatattggaacatctgaggccatttcagtgctaactattaggggatggttaggaaaatatggtacatatgtggaaaggaacatttggtagttagtgcccctgatgtttacaaaggcttttagtgaccaacaaatgctcatgctataatcttatgtgaaaaaagcaagtagcataattgcaactatatttttaatgcatagaataaaaggctagaaggaaatatcacagatccttgacatacattcccaaacctttgtaaatccgcggattcatgaaaacagacacatttgcacaagtgcctgatcttttctgttatacattcattagaagtcaagccctggtgccacaaagtatctgccttttcaaatgtgatcagaatgttctcttttgcttcaaggccatttttcacgaagcagtggcatttttgcctcttcatcagagtcaccgtgtgccctggaggactgagaacagcagagccgttttaggatgggacagggcagccaggaggattgggctcactccctactgagtgcctcactcccgtacagcccccatagaggaagaggggttcaaatttattcctcagccagatggcatgtgccgcctgtcctggaatttcacatcacttatgatggaccaaaattccaaaagctgaatccatgattgtcaaagtctggtatggcaggatgtcaacagtaatcgtttctgggcagagggatgattttctcttcccatcttgctttgtataaatacattttctataataaggttgtattacttttctcatcaagaaatagcaaagtactgttttactcaaaatatgaatagagccaggcatggtggcagcttatgcctgtaatcccaacactttgagaggcggatatgggaggatcactttagcccaggagtttgagaccagcctgggcaacatagtgagacccccgtccccactcccccaaagaaaacccacaaagcatttatcctggattattcacaggggccaaaaaaaaaaaaaaaaattcaggcctcctatagccatgagctacgaatatgaaaatatgcaaatgtgtaagaaaagccagcacatccgatttttacttttactttcacacctctgtccaccatgttccaagagaagaaacttggtcattgaaaggaatagatcaaatccaaagaacaaaaccactgtgctcattaaacttcttagtgttcacaaagctttagctgcaggttgaatggggcaacccgaattggctggctcacctgggctgcagggagcagagatcgcgacactgcactccagcctgggcaacaaagcgagactctatctcaaaaaaaaaaaagttcataaattcaaagttatgaattatttttaaaataataataatttacaataaagatgaggacaaagtgtgagtaaatggtggtttctatccagctctgttgagctgaagtggcatctccctgctggggcttttggggaagaagggtgtgtgttgctcttcagatcccaagcctcatgcccctactgggccctgtggggtgcttctcagcccaccaggagagccaccgttggaacacacacgtgggggacctggtgggtgccggtgtggtgaatgggggccacagcctgactccaggaagccagcaaactcggagctggaggagtcaggacacccccgatgagtcaagagttggttttgctgccagttgacatctgattgaaccatctcttcacttctccgtgcctcactttccttaccagacaggctctgctgatgctgtccctctcctgttcagtcgtgccctcaccgttaaagagaaagagcaaactgctgggcagcagcattgatttttttaatgaagtggaaagagagctgggaataacaagtcgggcccacctcacctgcctcacctggtgggtttatttgttttgtttttttttttttgttttgagacagagtttcaccctgtcacccaggctggagtgcagtggtgtaatctcagctcactgcaacctccacctgccaggttcaattgattctcctgcctcagcctccccagtagctgggattacaggcacctgccacatgcctggctaattattgtatttttagtagagatggggttttaccatgttggccaggctggtctcgatcccctgacctcaggtgatccacccacctcggcctcccaaagtgctgagatcacaggcgtgagccaccatgcctggccgtcacctggtggtgttgaatatgaactgctgcggtgttggtaaattaagcaagcagatagatgtaaataacgcttgggcaggaatatggagcacgggatgaggatgggcggccaactgttagagagggtagcagggaggctgagatctgcctgccatgaactgggaggagaggctcctctctctcttcacccccactctgccccccaacactcctcagaacttatcctctcctcttctttccccaggtgaactttgaaccaggatggctgagccccgccaggagttcgaagtgatggaagatcacgctgggacgtacgggttgggggacaggaaagatcaggggggctacaccatgcaccaagaccaagagggtgacacggacgctggcctgaaaggttagtggacagccatgcacagcaggcccagatcactgcaagccaaggggtggcgggaacagtttgcatccagaattgcaaagaaattttaaatacattattgtcttagactgtcagtaaagtaaagcctcattaatttgagtgggccaagataactcaagcagtgagataatggccagacacggtggctcacgcctgtaatcccagcactttggaaggcccaggcaggaggatcccttgaggccaggaatttgagaccggcctgggcaacatagcaagaccccgtctctaaaataatttaaaaattagccaggtgttgtggtgcatgtctatagtcctagctactcaggatgctgaggcagaaggatcacttgagcccaggagttcaaggttgcagtaagctgtgattataaaactgcactccagcctgagcaacagagcaagaccctgtcaaaaaaaaaagaaaagaaaaaagaaagaaagaaatttaccttgagttacccacatgagtgaatgtagggacagagattttagggccttaacaatctctcaaatacagggtactttttgaggcattagccacacctgttagcttataaatcagtggtattgattagcatgtaaaatatgtgactttaaacattgctttttatctcttacttagatcaggcctgagtggcctctctttagcaagagttggttagccctgggattcttactgtagccacattaataaacaacatcgacttctaaacattctataataccatcttttggccaaattgacttcgcctcttcctctctctttccaaatgaaatgtgtttcatttcactgtcagaccacatggttggggaccccacagagcacacagccctccctctgccttcccatgctggcccttcacccactgctggagtgccaggttggtccaagggttggaccaagttgtctgaggttgtctcaaggttggtcgaggctgtctccgcgctgggttgtgctacaaggagcccttctttccatgggtgtggctggcagtgagtgctcacagcaacagcccacagtgcagcccgagggcaggatggactcagtccctgcctccatacccatttctaaggaggcaaaatggcaaacactctacttttctcttttaatgctaaaaataagaaaacaccttgcagcccagggtatgggtagtgcatggaagccgtggagttgtgaggtgggaagtgacctctgctggatatgtctattcaggaagattgctggagtgggtggggtctctgggaggtcccctgagtgtgggaagctgggaccaccagctttctcgcacagggagtggccatcccagcttggagaggttccaggactggttgggaggcacgtttcagatttctatctgttgaatcagcgaagatattggattatgaggaatttgggaattaggaaagtgggtgcaggtgggttgggggtaggtgaaggaagacatgggcgtattgggggagcaggggctgctcagaggtgttccagaagctctgggtgaggaggtgagagggaccggggaatgcagctcggcccagcctccctgcctgaggtcagccatcacgtggtgatggcaagatggaaatgtgctttctgactgctccagccagtgctgccagattcagctccccagggagggcacctgagaggctccaagccaggagatctgttttctcctttgttttgtttttttttgttttgttttgttttattatactttaagttctagggtacatgtgcacaacgtgcaggtttgttacatatgtatacatgtgccatgttggtgtgctgcacccatcaacttgtcatttacattaggtatatctcctaatgctatccctcccccctccccccaccccctgttttctcctttgaatccttcttagaggccgggcgcggtggctcacgcctgtaatcccagcactttgggaggctgcggcaggaggattgcttgagcccaggagttccagaccagcctgggcaacatagtgagacctcgtctctacagataataattttaaaaattatccgggcatagtggcatgcacctatagtcccagctactcaagaggcagaggcaggaggatcacttgagcccaggaggcggaggttgccgtgagccaagatcccaccactgcactccagcctgggcgacagagacccccatgtcaaataataataataataaataaatccttctcagtcccttcctcactgtgtccccctccactgaatttttccacctcctctcccacttcccccactcccgctttccctctccttctctccccactccatctttttctttctctgctgtttctcgtccctccctcctctccatcccacaacactgcctaccctgtccctgccccaccctggtgctcaggatgtgtgaagtgaggggtggtagcccccaagacctcaaccccgaaggttagcctgttgaaaccactttctcccagctgcccccctggcagttggtgctgctgggggaaactgggattgggggccagattttgcctcttttcctgacaaagagagatgaagagttctctcaccaggtgcctgggactggggtgtgggtgtcccagcctatcccagcgcatctgttctgcatcatgattaatagtgctgctttcagccgggcgcggtggctcacacctgtaatcccagcactttgggaggctaaggtgggcagatcacaaggtcaggagttcgagaccagcctggccaacatggtgaaacctcgtctctactaaaaatacaaaaattaaccaggtgtggtggtgggtgcctgtagtcccagctacttgggaggctgaggcaggagaatcacttgaatctgggaagcagaggttgcagtgagccaagatcgtgccactgcactccagcctgggtgacagagtgagactccgtcctaaaaaaaaaggagttttgctctgtcgcccaggctggagtgtagtggcgccatctcggctcaccgcaacctgcgcctcccgggtgcaagcgattctcctgcctcagcctcccaagtagctaggattacaggcgcctaccaccacgcctggccagttcttgtatttttagaagagacggggtttcaccctgttggccaggctcgtctgggactcctgacctcaggtaatccgcccacctcagcctcccaaagtgctgggattgcaggcatgagccaccgtgcccagtcaactccttctcaaaaaaaaaaaaatagtgctgctttctctttcaagtgtcctgatttgggtgatagtaaatgccactctacttataagggatctacctcagaatgctaattgggacatttttgtagcactctactgttggcagcaggtgatgctcacaacagcccgtgagggtggatgacgtccgcttcacagatgacaaaggagcctcatgctcagaccgtgggctgccagagcaggtccatggctgcagccccacatggaccatatttcccccttgtcactctttccaccaagctcccttggaacttcagttattaagctctcttgggtggaatccaagttagaatcacaacatgtgcctcatatggattgtgccagtgaaaaatgacattctatttagaggcagggcagcctggcttagagtcagtttaaaatatgtattatgctgcaacaaatgtaccatgatcctgtaagatgttcacaacaagggaactggatgtggggtatactgtctgtactaacttcacaagttttctgtaaatctaaaactgttccaaaataacaagttcgtttaaaattaactccaggagaccaggtacggtagctaatgcctataatcccagcacttcggaaggctgaggcaggtggattgcttgagcccaggagtttgagacaagcctgggcaacatggtgaaatcctgtctctaaaaaaaatcacaaaaattagccaggtgtggtggcgcattcctgtagtcccagctacttgcggggctgaggtgggagaatcatctgagcccaggagtttgaggctgcagtgagctgtgattgtaccactgcactccaacctgggcaacagagcaagaccctgtctcaaaaaacaaaaatgaaataaagtccaggaaagaagtaggttttaccactcttattttctgaagagaaaactaaatttaatgtgtaaagtgaggacaagttcaccaagttagtgtttgagttgcctaaaatatgtttgctaaaactattcaaagctttcacataaaacatgatcagaagttctatgccaaaacatatgtgtgtgtatatatatatgcactatatatactgtatataaaaatgcaaaatctaaattgccaaccttttagaaattgctctgaaaggaaagcatttcaagataatttgcttacccaaagaatatactttccaagaaagcaagtaatacttaaggtgttcataatcctcatcaaattaattcttgctactgaaagcttacaaggagctgttttgatgtcgggtgtgacaggtttgacttggcagaaggtgtcactttactaacaacattttaaataagtgacagaagacaagaaactacacgttaaatgccagaacaaagagtgtctaagtggatgctaagagttgaaatatggctggatacctgcccaagagagctgaaaagtagatgaaagttggttacctataaactagtgcaccctaatgaattaaaaggtgttgatgagttaacttgttatgccttccagataagacatgcaaatggggcttcttcctccttcactacttccaagggatttaacaaggagaccaatgcaaatgataaggactgtagggctcaagctggggacagattggggaaagggggaccatcatgcccatatagatgtccctgtgccctggcagtcaaggctgctgaaaaataacaaaacccagaagtctgcgtgatgctgcctctccatttgtccaaagccttcttgcggcagtttgcaggcttttgcaaaagctccaggaccaaggagctatgttcatgctggaagcttgttcaggattagctgttctttgtgggatgggtgcagccagggccaggtgtccagggacagtgttttaacaaagggcatgaggtgtctgatctcacagtggaactccacttgcctttttttcatcttctcattctgcttcatgcacagaaccagccccatcctgaaactgactctaaattactcccgccccaggtggagtgcctttctcggagttcaacagagccttcctgtcgcccaagggacaactccactgaatgcccaagccacacccaaaacctaacaagtaaaaaccaaattctgtgctcccccatcctgggccattcctggtttctctactgctgttggtgataccaccatcagcttgtccatcatgaccctggccagttcctcccacaaccctccacagcacccagggacctcacctccattccatccgacacagatctcctcaccacaaaccttggttttgcaacagcagccatgagacctttacaccctccgcccttcatcctgtcccccactgaggccccagagccattccttaaagcagcgcgccacaaactataacccacaagccaattctggtacccagcctgttttgcacagccagtgaactgacaatgatcttttcatacagccagaaaaacaaaacaaaacaaaaaacaacaaaaaaaaaccccaccattctgagcatgtgacttccatgttcaagatgtctcatgttcagaaaggcccctggaaaaggaggaaggggagctgggcacaaagggagaccctctcagctgagctcctcccatccagacattttcctggacttcctatccaatgacttcccttagcttcttatcagccacccctgtctgcccaggaggctggaagatgtggccttttaactgggcacagctctgtcctctatcatatcagggctctgttcccaaggagggtagagagaatggacaccaggtggaccctcagcagtctgtgccacagagggagtgtttgcaatttccagactaaaagtccccatgtgcttgacggggtatgtgactacaacgtgatgcttgacttttcctcatatgaccagagccactttgtccatctggtacaatgtcagctatctgctaggggccctccaggattcccagtcaattccatatctgcatcaccaccattggcactaaataaaataaaatactcaagttcctgctggtgagcatgagcagtgctacactgggcccttcaaccaaggtgacatgataatgactgaaaataatcactgccacttattggggacgtctcatctgccaggcatggtacaaagtgctttaaataagcattcaacaatttcatgctgacagaagccctgtgagccagtggagctactactatgcccattatacaggggagaaaactgaggcagagagaggttaggtaattcgctcagcctcacacaaccaataggtggtggagccaggatttgggccccatctgcctgactctctagaggctctatcttccagtcttccagagttgagtctaagccatgaataggacaattagacagcagaggaaacccattcagccaccatgtgcatgaagagtaaggaatttctgtcatacagaggggagtgaattcactgagctgagagctgaggaaccattgatctgatggctgagacaccactgggaagactggagaggcttttctgggcatgcagtgccaggcacaggaggagctgagggaagatgactaagaggtactggcaaagaattcagaaattctgatggaagctttacatgttaccatcacatccatccatctatccacccatccatccacccatatcttcctccctccacccaatcatgcatacatccagtcatctatacaccacccacccacccatccatccatccatccatcccttcatccatcccatcatccatccaattatacatacatccaatcatatatctgtacataatccattcttccctcggttcatccatccatccattcatccatccatccacccatcccttccttcatccttcctatcatccatccaatcatatatctgtacataatccattcttccctcggttcatccatccatccattcatccatccatccacccatcccttccttcatccttcctatcatccatccaatcatacatatatccaatcatacatctgcacatcaccagctcatccatctatccatttatccatccatccttccttccatccatcattcatccatcatacatacatctaaccatacatctctacatcattcattcttccatcgattcatccaattatccatcattccttcctccatccatcccattatccatttgatcatacatatatcatctatacatcatccattcatccatccatccatccatccacccatatcttcatccaatcaatcatacatacatcgaatcatctacacatcacccatccatccatccatccattcatctatccacccatccatccatccatccatccattcatctatccacccatccatccatccatccatccatccatccatgtaaccatccagtcatatatccaattacacatccatccagttatacattcatacatgcatctaatcattcaattatacatacacacatccatataattctacatccaattatacctccatccaattacacattcatacacccacctaataaattattaattcatatatccatccatataattatacatcaattatacatccatctaatcattcagtaattcacccaccatccagtcatctatccaataatacattcatccaatcatccatccatccatccacccattcatccatccatccgtccgtccacccatcatggtatgagccatgatttaccacgatggtcccctgtggacagcccaggtggggcagaactgaagggaagcccagggctgcccccataaacatttgcctcctttacatggatgagaactagatccacatgtataaatcctcatgatttgaaggtgcttttaccaacattcactcatgggattctcccaggagctctaggaggaggcaggtagagttgaggtcatctcacgcattttacagatgaggaaacggaggccctgagaggcaggtccaaggccacctgaccagaaagaagtggaactgggacttgaacccagccatcttgccccttggtcccatgctctctagcctgtaactcctgcttcctggtggggcatctccaggaggaccctatcggctggccatgggcctgccctggagtcttttgctctgtgtggccatccttcctccctcaggagagtgtgtgctcccagagcacaggctgtatcttctgagcattttgtcccttcccagtacctagcactcagctctgtatacattgggctctcaagaattctcaaccttccagagtgtaaggccttgacctgctcagccctggatactgcatgatgcattgataagcccataaaataaccagggcagattgactcccagtggccaaagtgccacagggaagggacaattcagcccttctaggaggaggaggaggtagttttctcatttctattaaggcaacaaaagctgccttactaaggacattcttggtggagggcgtgactgtcaaccactgtgatcatttgggcctctcttgcccaggcttcccattctgaaaggacagttttattgtaggtacacatggctgccatttcaaatgtaactcacagcttgtccatcagtccttggaggtctttctatgaaaggagcttggtggcgtccaaacaccacccaatgtccacttagaagtaagcaccgtgtctgccctgagctgactccttttccaaggaaggggttggatcgctgagtgtttttccaggtgtctacttgttgttaattaatagcaatgacaaagcagaaggttcatgcgtagctcggctttctggtatttgctgcccgttgaccaatggaagataaacctttgcctcaggtggcaccactagctggttaagaggcactttgtcctttcacccaggagcaaacgcacatcacctgtgtcctcatctgatggccctggtgtggggcacagtcgtgttggcagggagggaggtggggttggtcccctttgtgggtttgttgcgaggccgtgttccagctgtttccacagggagcgattttcagctccacaggacactgctccccagttcctcctgagaacaaaagggggcgctggggagaggccaccgttctgagggctcactgtatgtgttccagaatctcccctgcagacccccactgaggacggatctgaggaaccgggctctgaaacctctgatgctaagagcactccaacagcggaaggtgggccccccttcagacgccccctccatgcctccagcctgtgcttagccgtgctttgagcctccctcctggctgcatctgctgctccccctggctgagagatgtgctcactccttcggtgctttgcaggacagcgtggtgggagctgagccttgcgtcgatgccttgcttgctggtgctgagtgtgggcaccttcatcccgtgtgtgctctggaggcagccacccttggacagtcccgcgcacagctccacaaagccccgctccatacgattgtcctcccacacccccttcaaaagccccctcctctctctttcttcaggggccagtaggtcccagagcagccatttggctgagggaaggggcaggtcagtggacatctgatcttggtttagtatccttcattttgggggctctgggtgtggcctgggcctctggactttggccacggtgtttgttccagcccttctcctaacctgtcctttccagacactcggcatctaggttattagcacctcgcatactttctgacatgctcctcagtcctgattttgaccatcttctcttgcttcccatctgtgtcagtcaagactgcatttggctgtaagaaacagaaaccccaactaactgtggcatttacatgaagaggtttacttttctcacataatcagatgtctagacttggccagcacctcaagggtcattgatgctctcctgtctttattttctgtcatctttagtggttggattgttgcctcatggttacaaagtggctgctgcacttccaggcatcacatctgcctttgaagcaggaacaagttgcaaagtaaagtggccaaaagggccctgaaactaaatgtgtccccttaggaaagcaggagttttcttgcaagtggcaatcttctgcttatgtctcattggccagagctgggtcttacggccaccccttgctgcgagcaaggctgggacattgagcattttgccgtccaacctctttagcagaataaaccaagggggaagaacgttaatagtggcttttgagtcactagttggcagtatctgcccctctatctttccatcctccccatggagtttcaaggttcctttctcagtacttcttcaggctctgcacgttcatttggatcttgtgtcttggggtgaaaaactggcccaagtgtctccccaagcatccacctttggattaatttggaaaatggctgtcaagtgcccgcctcttgcttggtataatgctacagctttagaggacgcagcaggcatgggccttgccgctgaggttcttagcctcatgagaatatccagatcagattctcttggctccttcttagagccagtgatgcaagacacttcctgctcatcttgtcgggacggttttacaagttgcctgccatcctgagaaagtctacaaaacgatgccagacctcatgccagcttcccaagccttgactctcagtgctccctcaacaggattctggaagaatctcccaaacaagtcgcaatgccctctggaccctgtgcaggcatgagactcaagagcattggctcccacccctggtggagggaacactgctggggctgggatcttgcctggttgctccgcctgcacccaagacaaccataattaaaatgtccttcattgaacttggaaagccttcaaagctgacaactccttatgtgtacccggaaaggcctgggagtgtgccagggcattgctcgggagggacgctgatttggaagcatttacctgatgagagactgacagcagctcctggtagccgagctttccctcctgcctctgctgtgaaggtggacccatccaacagtcaaatgcctgactctggacaggagcggacctatttattgccatgcaagggactctgcacttttgaattgtgggtcatgggcttggatttaggggttagagctgggagaagtcttggaagtcacctagagatgacactgccattttgcagatgaggaaaccgtccaatcaaaatggaccaaggacttgcccaaagcctcacagcaaaaccataggcccccgcactaaccccagagtccctgtgctgtcttaaggatcatatagttgtaagcaatcatctggttttcagtatttcttcttttaaaatgcctggggccatgcccagcagtctgtttcactgcagcgtttacacagggctgccgggctttcctggtggatgagctgggcggttcatgagccagaaccactcagcagcatgtcagtgtgcttcctggggagctggtagcaggggctccgggccctacttcagggctgctttctggcatatggctgatcccctcctcactcctcctccctgcattgctcctgcgcaagaagcaaaggtgaggggctgggtatggctcgtcctggcccctctaaggtggatctcggtggtttctagatgtgacagcacccttagtggatgagggagctcccggcaagcaggctgccgcgcagccccacacggagatcccagaaggaaccacaggtgagggtaagccccagagacccccaggcagtcaaggccctgctgggtgccccagctgacctgtgacagaagtgagggagctttgcgtgtttatcctcctgtggggcaggaacatgggtggattctggctcctgggaatcttgggttgtgagtagctcgatgccttggtgctcagttacctccctggctgcctgccagcctctcagagcatttagggccttctggacttctagatgctcctcatcttgcctcagtcagcgcgtcagttccagagacttctctgcagggttttctggggcaggtggtggcagacccgtgccttcttgacacctgaggtcagtccaccctcctgctcagactgcccagcacagggtcacctcccaaggggtggaccccaagatcacctgagcgcacagagggtgcagatgactggaccacaccttttggtgatcttaatgaggtggtcccagaggagctcagacatgcaatctagcatccagttctgggactctgtctccttttcaaacgtattcatgtagaacaggcatgacgagaatgccttgtcaacatgggtgatggggaatcaatcagacagggcgccgggctcaaggctgcagtcacccaagagtggctcagcccaccaggccctaggaaacgcctgcacagcctggagctcctggagtcatttccttcatgtcttcttcactgcacttacgtaaagatgccagccattggtttggtgatttggagggtgcccagttgcccaacaagaaatgcagaagaggcctagccaggatttcaccagcagtggagagtagagaagatgtggccagaaaagagtttcctttccctcctaaagatggtactccctgcagctactggggaagcctgcagcattctctagggctctgtgtgttgagagcagccccaccctggccccttctgagtgcatttctgctttgtgacttgatccgtgaagtcccctgagatgggcagaggggatgtcctcgaagctggggcagagcctcatccttgaacgtgaaggacgtttgaagactgtggcatgatcacaggatgagatcacagggaacttgagtttctctcctcctctcccttcacagttatttcactgagggaaatccctcccctgcccagaatgaaaactctagccaactcttgacttttccatcactccaaagtagttgaaagtacattagtctccacagtggcaaaacagtgtgcaaaagctaaataattagaacagccagtcccatgtgacagtcaaagcttctaactccattcaaagttgcagccattcccctcgagggctggcagggaggggaggggtaagagaaacaggaaggttcttactgagttggtcctggtgtgagctgcgtcacactccctgcagaggtttcaaggagactctctctctctctgtctccatggggaccttatttgaattcttctactcttaccccagcctgccatctccagctatcctcccctgaagagcccttctgctgcgctggattctggtggccatgtcatctcctcggccccgtgggagtctgaagatctggctgcagcctcacctctgaggtcctgctagttgccacctcttaaacatgatctgaggctcccatgcactctgacctgtgcccacatggggcccacgggaaacacgctggcaagcaaactgtgggtgtgcagacggttctcagggctgcagcacctgtcctttgctctgcccccaaagcaaggccagcccatcttccatcctctagtgttccttggtggggccctgaccacagtccaccaggtccctaaccagaggggacacacaccaggtgtcctcaatgtattgccttgaaacagttgtgctgggactgtgatggggggtggccatgtagccacccccaccacccccaagccactctctccaaggaaatcctcctaaagatccctttacatcctccatgtggtggggaggttctagagttgggtgcatgtgtcttcagctactgacaatgcagaccttagttggcacctcgctctggcctatcctgtttgctgttcttggcgctccagtgaaactccccatgggccatccagttggggtgcagtgtggccacccccttgcaggttcctgccttgctggagagcacagggccctcctggctcttgtaaaacactccccatggtacagagaggccagcagtgatgtgaggcccaacctccctccatggtgttcccaagcagctccctttctggggtcaaggggtggcaaagacagtgcagcgtccaatttctgactcaagccgggcctggctatcgcagctctgcactgtgtgtgacagcaaggcaactcacccagtgccgtggcagtgaccgtgtccgaggaagcctcctcacaccctctgtctcaaggactctggcatttagctggacttgctgtagctctgagcctttctgccattgccatcaccttgtcagaaactcaggccgaatctgcactcagagttgtgcccaggcagttgagccaacacttgctcagcgatattgtcacatgacaaggcactgtcaccactgggcatcgtgggtagcgcagtgtcggctggatggacccggagggtgtctgtgtcatgctagtgctagtgatgggagccccgtgagcccattgcccgccctcccatgccctcagcagctgcctggggacagccaatggcctgggtgtttctgaggctaccacatggcttccaggaaactcgagaacctttctctcccttgcctacactcttcacacaggcctgtgctggccagcggtggggatccggcattcctatcttaggtgcagagagtgactgactcattgcaggcctgggagataagactgatggcccagccagcaagatgtatggatttctcagaggcagtggcctctgtcattgtcctcaggaaatgctggtgattctggtggcctgaggtcaatgcatgtcaacgtggccaacttgccttataaactttttttctggacaattgcgtgcactgtcctgtaacagtgtcctgttgtttatgatgcagaaataggtgtttttaaagcctattgattttggtactattaatgtggtcaggaactttctcagtctttcttgtttggggtgagctgtggcttcctaaacaggaacccaagacacccccaaaagctgctcaccagcactgccagcctccctcttaccaagtagcacccgttcaggacattctgcgaaaggcatttgcccagaagttgggaggaaggaaatgtaacattttggggcacctaccatatgccaggcaccaggctaaacgtgttcacacaaattctcttactaaccctcaccatccttctacaagacaaactagtatcttcatcttggggttcaagatgaggaaatggaggctcagagaggttgaatgaatgccggtgcctggatatgaaccccatctgcctgactccgcaacccaggcaaagtctttccttgaacttcccagcagccactgcttagacacagcctccacaaccatggctcagcagcaaattgcttctctgacctcactcagcctgtgtgtccttgttgagtgaggcattcaggaccctggtcccaaagtggagaaagtctttcctactaggtcatagctacacctgcatgtgggtgctgtgccttttgtttagtgaacttttatcaccagcatcctcagcaatgacatttgcagagaagccagagctgaggcaccttggtattcttgggatgtgactttcctgaatgtttaagggaaaatgcccgaaggtacagagagcttggtttctagtaaacaataactgtcttgcttttaccccccttcatttgctgacacatacaccagctgaagaagcaggcattggagacacccccagcctggaagacgaagctgctggtcacgtgacccaaggtcagtgaactggaattgcctgccatgacttgggggttggggggagggacatggggtgggctctgccctgaaaagatcatttggacctgagctctaattcacaagtccaggagattttagggagttggttcttatcaaaggttggctactcagatatagaaagagccctagtggtttttttctaataccatttctgggtaattcctaaggcatttagtgttctgaaagatgctagccttgtccagcctgggagttgagaatgaatgtctaacagaaactctaggccgggcctggtggctcacgcctctaatcccagcactatgggagacccaggtgggcagatcacctgaggtcaggagtttgagaccagcctggccaacatgtgaaatcctgtctcactacaaataaaaaaattagccgggtgtggtggtaggtgcctataatcccagctactcaggaggctgaggcaggacaatcgctcgaacccaggaggtggacgttgcagtgagccgagatcgcatcattgcactccagcctgggcaacaaaagcaaaactccgtctcaaaaaaaaaaaagaaactcaaatatgtgtgacaggcgattctcactgcaggctgccctgtggctgatccaggagcaaggccttaaccatgtcatccccaagcgattgcttgtaaactttcttctgtgcagccttcaacccttattatgattttcttctcaggaaccaaactgctgtattcaagaaaggcagctttgtgtaatcatttatcataaatatcttaagaaaaatcctagagattcctaattttaggaaatgggagacctatggtactgatataatgtgggctgggcttgttttctgtcatttgctagataaatgaacttgagagcctactgtaaaatgtggaagcttctagattgcagaagggctggaaagacactgttcttttctcccgagtgatgggatctgtccagtatttagagctgcctctgaggccatctgattctaggagactctgcctcgttgaggatattttgaggcctaactacacattcctgcccccagagaggtcacagcctatagcaggctgatgtttctcatgtcacatggcacagaaaggcacattttcgttctcaggctaacaaagagcttcaaaaactattagaagggacagtggctataagagaagaacctcagtcaatgtgtgaaattaactaggaacctggctcctgtttcttttaggtcatgtttttcagcttaggtaaaactagaggctttgataaagcatgacctctagaaatcattgcttttcataaatggaagtgggtttgagttttttctactgattgttagtgcaggtgatgtctacatgcccccagaacatattccatgcaacaaaaaaagcccaggtcaccgtctttgctgggaacttgacttttgtgctcactgaattttaagctttctgacagcagcctggaatcatggagggataaagtacctattagtaagatggaaaaaggtgtttcaggttggagctgcagtctgttgagagtaagctatgggaaggcctgtatacgaggggtggacttttcttctgtaagtgtccagagaccaggcctcctgaagagggcatgggggcttaacttacctggactactgtgtttacaatactcatttatcttgaactcctcctaacccctgagaattgctacatttagtatttgctgagtacttcctagcatcctagggaatcaatagaacattctcccaaccaggctgggtgcggtggctcatgtctgtaatcccagcactttgggaggccaaggtaggcagatcccttgaggccaggagtgcaagactagcctggctgacatggtgaaaccccgtctttactaaaaatacaaaagttagccaggcatggtggtacacacctgtaatcccagctacatgggaggagtaggaggcaggagaattgcttgaacctgggaggtggaggttgctgtgagccgagatcatgccactgcactccagcctgggcgacagagtgagtgagactctgtttaaaaaaaaaaaaaaaaagaacattctcctaacctggcttcttcctccaggggtgtaattaatcatgtcagtttcctcattgatacacacacacacacactacaatcctgtatccattacttttcaaggtacatttactatttacgtttggggtccttgtctcttttttaatagtgtttcttaaagtcttgtattatatcagagtacagtaacatcccagtcaagagcactctagtaagctctaggaggaaagcgacttccggaaggcagtggagacctgtcctgttggggcagcataggggcagcccctgcctctggtcagttctggcgctcaggctcagggttgcctctgggctgttcttcccagagactgacaaagggctcccataaggcacctgcagagcctgtgagaagctgaagtcaatgttttcctgacaccagttgatctgtgcaggatccattgatttaaccacctgctgtgtggcatgcactgtggtcgatgccaggaacaggaattggaggggcccatgagcatggccagtatcacaggctggaggtgctgctgcgctctgaccgggcctcttggggatgagcccatgtcaaccaccttgcctccgatggggtcgggcccacaggttacctttgtgtgtccatgaccacaccttcctccccgacctcatccaaatctctttcttttccaagcccctgaatccttcagggctgcaggttttgtttaaagcagagctggtgagttgcataggttgttgcattgggactagatggggtgttcaaagagttgggagttaaaaaacataaagggtatttattaggagaaccaaggagtgtaattctcctgttcttaatatgcggccaggttaatgaatgtcacgtgaatgaaccagaaaaaaatgaagtgtgcccttgatcagctgggttggtgtgcagcaagctgtgtgaccaggggacagcagtggtcctgagggccgtcactgtctgccgtgcagagcccttcctcccacgggggcctacctcacctgtgccaagggcttgtctgtggtcagtgacctggatagatctgaatggggcttctttttcgaggagtcttatggcaggtctctcagtaaagactccattcttgatgatcacacattttggattttccaaatctgtcagagaatgggcttgaggcggggtttgtgggcactagtttcactggtttcatttaccaaaaaggggagcagaagtcaagtatggtggctcatccctgtaatcccagaggcaagagaattgcttgagcccaggagttcgagaccagcctgagcaacataaggagaccccgtctccacaaaaatgaaaaataacattttagtcagacgtggtggcatgcatctgtggtcccagctgcttgggagggtgagatgggagggttgtttgagccctggagttaaagttgcaatgagctgtgattgcaccactgcactctagcctgggtgacagaacgagaccctgtctcaaaaaaaaaaaaaaagaaagaaagaaaggaaaaaaaaaactcatgcctgtaatcccagcactttggggaccggggtgggcagatcacgaggtcaggagatcaagactatcctggccaacatggtgaaaccccgtttctactaaaaatacaaaaattagccaggtgtggtggcacgtgcctgtaatcccagttactcgggaggctgaggcaggagaatcgcttgaaccagggagtcagaggttgcagtgagctgagatcgtgccactgtactccagcctgggcgacagagtgagactctgtctcaaaccaaaaaaaaggggtggggggcgggggcaggagaacagtgagaggtagggagaggaaaggggattctcgctacacccaaaccagataccatctagaggctagaatctttgggaggctcaaattccctagaaagcaggagaagcttctgtagccctcccgctttcccagtagattaagcccagggcggctccagatgtgtgacatgctctgtgcccaaccagagcccatcataggcagaggaataacacccacaccagaagggccctcggaggtcaccacgtccaagaaccctctttacagatgaggaaactgaggcccagagaggggagagccacctagcgagctggtggcggctagaccaggagagctgtcattccaagcaagcaaaggcaacgagacgagcccagagctgtgctcccatctctttgttagggggcctgggatgccctctcagtgtcattttgtccaggatgatgctccctctcttaagcgattaatgcgcccttgctaaccttttgctatcgctgcctcttcaaaccagaggagttgagagttccgggccggcagaggaaggcgcctgaaaggcccctggccaatgagattagcgcccacgtccagcctggaccctgcggagaggcctctggggtctctgggccgtgcctcggggagaaagagccagaagctcccgtcccgctgaccgcgagccttcctcagcaccgtcccgtttgcccagcgcctcctccaacaggaggccctcaggagccctccctggagtggggacaaaaaggcggggactgggccgagaagggtccggcctttccgaagcccgccaccactgcgtatctccacacagagcctgaaagtggtaaggtggtccaggaaggcttcctccgagagccaggccccccaggtctgagccaccagctcatgtccggcatgcctggggctcccctcctgcctgagggccccagagaggccacacgccaaccttcggggacaggacctgaggacacagagggcggccgccacgcccctgagctgctcaagcaccagcttctaggagacctgcaccaggaggggccgccgctgaagggggcagggggcaaagagaggccggggagcaaggaggaggtggatgaagaccgcgacgtcgatgagtcctccccccaagactcccctccctccaaggcctccccagcccaagatgggcggcctccccagacagccgccagagaagccaccagcatcccaggcttcccagcggagggtgccatccccctccctgtggatttcctctccaaagtttccacagagatcccagcctcagagcccgacgggcccagtgtagggcgggccaaagggcaggatgcccccctggagttcacgtttcacgtggaaatcacacccaacgtgcagaaggagcaggcgcactcggaggagcatttgggaagggctgcatttccaggggcccctggagaggggccagaggcccggggcccctctttgggagaggacacaaaagaggctgaccttccagagccctctgaaaagcagcctgctgctgctccgcgggggaagcccgtcagccgggtccctcaactcaaaggtctgtgtcttgagcttcttcgctccttccctggggacctcccaggcctcccaggctgcgggcactgccactgagcttccaggcctcccgactcctgctgcttctgacgttcctaggacgccactaaatcgacacctgggtgcagctgctccactccctcggcctcctcccgtgctcaggctgtggccgcacgcgcccctcacgcttgcccgccactctgcatgtcaccagcacccccgctccgtgctacccaccttgtttgactctctggccacttgatttgtccacaacggcccatcagcccacaggaggtttggtgggtgccttccaccgacaggatgacgggtgccctcatggtgtctagaactctccaaccctcccatgtaggcataagcagccccactttgcagatgaggaaacggaggctcagagaagtacagtaacttgccgaaggccaatgagtagtaagtgacagagccaggtttgggatccaggtaggttgtctctgaaagacacgcctgtcctgcatcccacaacgcctcccaggaggtgctggagtgtggacgcctaacacagagatgtgcagggcacacacagcaggtgacacacacagcatccagaggtggcccagagctcatgctgtgcctttggcccagtgccctgcccccacccactctgccttgtggcaggaagacaaggagcagacacaagatctccctggtccacatgccaccacctccctctgcagaggacaaggggatcctcatgctggcattggagggggttgagcagggcccaccttgagccctcaggagcacgaccacagcagccctgcagggagggattggtgggaggagagtcccaagtatcagggagaggagagttggtgtcccacaggagacctcagagccacaaggcgagcttgttcataaatttgggacccttagcatttcacagttatttgcagagcccagaaatggatgttactgaagctcacagttgcaagcatctgttaaatttttattagattttacttttagggaaaactttgaaatgctataaagaagcctgtgtttaaaagttaagacagaggctgggggcgatggctcacgcctgtaatctcagcactttgggaggccaaggcaggtggatcatttgaggttaggagttcgagaccagcctggccaacatggtgagaccctgtctctactaaaattacaaaaaattagctgggcgtggtggcgggcacctgtagtcccagctactggggaggctgaagcaggataagtgcttgaacccaggaggcagaggttacagtgagccaagatcacaccactgtaccctaagcctgggcgacagagtgagactctgtctcaaaaaataaaataaaataaagttaagagagaaaaaaatatatcctatatcctttgttaaattccaaaacagtaggggacaaataactgacttgacaggttactacaatatttcctgaaatgatgttttcttgaatactggcctactagaggttcataggtgtgtttggattaaaaaagagttccatggcccagtgactgggggaaaaaaataaaagactaaagtaagttaaacaggcttttctgctgcaggacttgtcagagcctttaatgtactaatggccattgtgaccctctgagaaggtcacagagtgggtttcccaaacttacttgattctacctgctaacatttcctggaggaagtttgggaaatgccgatttagcagattcttttgttgtgccgtggatggtgctggttgatgtgggcaaaacaaagaacacgtgagtcagatccgcctggggctcttactaaagtgcaggttcccaggtgccactttaggcttacagacccagttgtggggtaagcctgggagtcttttagcaggtgattctgccacatagtatagttggaaaacctctgggcatactcattgctggtccctctagaaatccaggtgacaatagccaatgagaagctccaagagacccagttgtccatggggtagagggaatgtgatattgaaaccaaagaagaaaatctatgatcagttttcagcagtgactgtcaagagaaggagaagggtgagttagcgctgatgctggctgacaggtcagcgggttggtttcaccaaggagtgtgatgaaggctgatgttgtctgtgggaatgtatgatggtaactggtttgtagctaatttggggaagcagtgagaattcgtgccctttgaagaccagtaagtggcaagaaacccaccaggcctggctcagggctgggctgggcttggctcgtctcagagcagctggggctggtggccaaagccaccattagtgaggggcaggccctgggggtacaaccagcaactaggggacaaagacaaccctgccagcctctcctattctggaggcgtgtgaccagaaatggagatgggttggtcagcataagatggccaggaaggtggaaatcaggactgctggcaatctagccacatgggcaggggagccgggtggttccaggcagtttccaaggccaagagggtgagcaggcacctcacagggaatcagggccaagcctggctgcagtgtggagacaatgcacccacccccatccttggatcttgcaggaggctgggtcctcactgagctaccaacatccatggccctgaggcttttaaaacacccatccatggagtggggctggtcccagtggggtgaggctgaccctggcagaaacagggcaggagcctgtgggttagggagactgcaccttccttagatagcctccatgccatcatgtccccgtgacagtttctgctgcgtcccctctgcatggtcccaccctcggccagcctgctgccccctcttgccaggttgcgctaatcagtgaccccagtgtgctgtgttgatactaacaatgcgaggcctagcagattcaagggaaaagagaaccaactgggtttccaccagacccaactaaacaaacatggacctatcccagagaaatccagcttcaccacagctggctttctgtgaacagtgaaaatggagtgtgacaagcattcttattttatattttatcagctcgcatggtcagtaaaagcaaagacgggactggaagcgatgacaaaaaagccaaggtaagctgacgatgccacggagctctgcagctggtcaagtttacagagaagctgtgctttatgtctgattcattctcatatataatgtggggagtatttgtcactaaagtacagctgtcatttaaagtgctttgtattttggggcaggcttttaaaaagtccagcatttattagttttgatacttaccccagggaagagcagttggcaggttcatgaagtcatgctcctaattccagctttcttagtgtactttcagtgagaccctgacagtaaatgaaggtgtgtttgaaaaccaaacccaggacagtaaatgaaggtgtgtttgaaaaccagccctaggacagtaaatgaagccatcttctcactgcataaactgcacccagatcttcgcccatccttctcagtatttcacttcacccattgtttactgtctcaatgactggggaaatgtctggggaaatgctcccgtaattgcacagtggcgtttttcctggaaaatcccaccatggctctagataagacctatttttcttaaaggtatctaaaatttccagcataaattctgtctgaaacacctgaattttaatcagtactggagcccggagggcatctccagttgccacatagctctgagcattcagtggtgtgttgagggctgctcccggaagtgcctgcagagtcagggctccccagcctcatctagtgaggcagtggaagggcctgtggggatttggagagctggcctgggtctctgaagtgatagtgacagctgcttgtcaatcacggtgcacatttagtgctgggggcagggggcagggaataccagcctcatgcatgcatgcattcatttgttccttccttcattcattcattcagtacacatgggtacaacatccctgccctggagttgcccagagtctagggaggggaaagatctattaccctgggcctcggccagctggggagtgctgctggtggagaggggccgtgtgcagcgagggaaggaggagtcgtcaatacccccaccccagctttgctttcttgtcatcagccccagggccccagcctgtgtccctcctctcccattgctacttcatctcctgggtcctccttaccaagcctgaccacacagagggccttggccgcttccatggggaattggaaagcaataagatagcatcccctagaagcccagtgaagtctgggacaggacccttctctgagctctgacttgctcttggaaacacttcgaggcttagcctccccactttgtttcccgagagtgtgacctgttcccctccaaacacccccttctcctccagggccatgcccacccgtcaaaatcccccacgggcaggacgaactgtgggtgtcagtcaccatctatcctgcatcctggttccagggccccccccagccccgcctccatagggacaggcgtgcagacacccgtccctggctgcttcctcttgtggaatgggttcaaaagtaagcagtgttgtttacactgacaaactgaaaaaaaaagaaaaagagataacattggaggcttggcacagtggctcatgcctgtaatcccagcactttgggaggctaaggtgggaggatgtccccagcccaagagttctagaccagcctgggcaacatagcaagaccccatctcaaaaaaaaaatttaattggccaggcagaggtgggaggatcacttgaacccaaagggtggaggctgcagtgagccgtgatggcaccactgcactccagccagggcaacagagggagaccctgtctctaaaacaaacaaacaaacaaacaaacaaaagagttaacattggccagattaggattcaccagatagtgttaatattagtttgatttgagactttaatcagaaagcacatgtgtggtgggggtgggtgtaacctaagtcaggtagaatctttccaacttggggggggcacactcctgattgtagccatatgagtctgtcagtgtggtggaagaggccatgggttaatgggcaggtaaaaaagcaccttgcctggaattgagtagaaagtaaggcccttcagaccccgtgacacacttggggacattttcttgagtaacatcctaagattcatgtaccttgatgatctccatcaacttactcatgtgaagcacctttaaaccagtcgtctccaaattcaggggcacagtaacatccaacaggctggagaaagaacgtactagaacttccattcctttttcatgtcctcttctaaaagctttgtcagggccaggcgcggtggctcacgcctgtaatcccagcactttgggaggccgagacgggtggatcacgaggtcaggagatcgagaccatcctggctaacacagtgaaaccccatctctactaaaaatacaaaaaaacgagccgggcgtggtggtgggcgcctgtagtcccagctactcgggaggctgaggcaggagaatggcgtgaacccaggaggcagagcttgcagtgagccgagattgcaccactgcagtccagcctgggcgacagagcgagactccgtctcaaaaaagaaaaagaaaaagaaaaagaactgtgattggggaggacggtcactttcctgttcttactgatcagaagggatattaagggtacctgattcaaacagcctggagatcactgctttcaaccattacctgccttatttatttttagttactgtccttttttcagtttgtttccctcctccatgtgctgacttttattttgattttatttatgtttatgtttaagacatccacacgttcctctgctaaaaccttgaaaaataggccttgccttagccccaaacaccccactcctggtagctcagaccctctgatccaaccctccagccctgctgtgtgcccagagccaccttcctctcctaaatacgtctcttctgtcacttcccgaactggcagttctggagcaaaggagatgaaactcaaggtaaggaaaccacctttgaaaagaaccaggctgctctgctgtggtttgcaaatgtggggtttgtttatttgttttttagcctcaaagacctttcttcaaatgagttctggcatagaagcaccgtgtaaaatagttagaattctgggcaaaggggaaaagagagctgggggccatccctctcagcaccccacaggctctcatagcagcagctcctaagacacctggtgggaccttggtttcgaaatcgctactctaaggctgggcacggtggctcacacctgtaatcccagctctttaggaggccgaggagggtggatcacctgagatcaggagttcgagaccagcctggctaacatggcaaaaccctgtctctactaaaaatacaaaaattagccgggcgtggtggtatgcgtggtggtaatcgcagctactcgggaggctgaggcacaaggattgcttgaaccccagaggcagaggttgtagttagctccagcttgggcgacagagcaagaccctgtcgcaaaaattgtttaaaaaacaaacccaaaattgctactctcattgggttcctttgcccattcctgattttggcaagagaaatgcttccagattgccctgatctgggtaggacagcatcacgccatagcaacactgccccgtgagctcactgccccctcaactagcttgtggtccttggttaatgtcagtttcttttttgagtttgtgttatgtctaagggtcatctgctgggtaacggaacccagggactgccctagtccctagactgtgccatgcccgactctgccagctttgtcagtgatgctggtgctcgcctcctcgggtgctcgcctggtctgagcacacccaaggagttcttgaggccttagggttgtttgcgagagaatgaaagaacacgacctagctctctttagcatccttggtcaggttcaacactgcccccaggggcctctggtggagccaaccaccatcagccaaataaatccataattagagtcagaaaatggatgtctgcatatgtgtagtgcactaatgtcctgccgatgattgacatggagtggagagtgacctgatcattgctgtgagctctgctggccttggcacaactcatgctgataactaatgcacacagttcctctgggaggaaatgtcctcagggaacttggagtttgggtggggatgtgggtttgtgtgcccagcaagcccttgtggttgtagcagacactagtggcatctaggaggcaaagggtcaccccagtcttagccacgttttgagtcaaggtggcggagtggggctggtgttgactcttggtggcagtaacttttcccaatggtgaaaaacccctctatcatgtttcatttacagggggctgatggtaaaacgaagatcgccacaccgcggggagcagcccctccaggccagaagggccaggccaacgccaccaggattccagcaaaaaccccgcccgctccaaagacaccacccagctctggtaagaagaacgttctcttgaatcttagaggaagctgaagctctcagaggtacagccttcattttaggaggccttaggccactgagaatgaataacccctggcagctggtcagcagcttgcagtttactaagcactggagtcttcattgccttctcagtccttttgatttctgaggcaaatgttgaatccctacctttttttttttttttcttttgagacagagtttcgcttttgttatccaggccggagtgcagtggtgtgatctcagctcactgcatcctccacctcccaggttcaagcgattctcctacctcagcctccctagtagctgggattacaggcacctgccactatgcccggctaattttttgtatttttagtagagacagggtttcaccatgttggccaggctggtctcgaacgcctgacctcaggtgatccacctgcctcggcctcccaaagtgctgggattacaggcatgagccaccactcccagcctgaatcctcactttttatcaatgaagaaattgaggctgattctgcagcatgataaaaaaaaatacagaaaaaggaaaaaaaagaaagaaatcgagcctctgagagtttgcttgactgagtctaaccagctcattttaaacccgaggaaaatgcagtcacatgactactaagtggcagctctcggagcctctctggccccaagtccagggttccatagaggcagccccagcatggcatgttttcagtccccaaatgagactctggagacaaatgtctctggagacagagcagcagcctggataagtcacaatgggtgacgtcactcagggctcaacccctgggcagcttaacttgctagggacgttaggagtctgctgcaaaacctgagggtcttagctgagcagtcacaggctgggcccgttgccctgggctcctgtgagtaaaacccagtcaattttgagtacccagtaaggcatccattgagttattttgcagccaggagtgctattaagaacagtcgcggctgggcgtggtggctcatgcctgtaatcccagcactttgggaggccaaggtgggcggatcacctgaggtcaggagttcgagaccagcttggccaacatggcaaaaccccgtctctaataaaaatacaaaataattagctgggcgtggtggcgggcgcctgtaatcccagcttctcaggagggtgaggaaggagaatcacttgaacccaggaggcagaggttgcagtgagctgagatcgcaccattgcactccagcctggatgacaaaagtgagattccttctcaaaaaaaaaaaaaaaaaaacagtcgtcctctttggggattagggacagcctgcctgcctgcccgagcacttctctcttccattgccccagtgaagtattccaggcccctgggtttagactctgcaccatgtaggggtgtctgacctgcacttgctccttggtggcacgggcagcctatggcacttgctgcgggctgtgaccaaagcctggcctggatcttggatcttggtgactctgcttctccctggcctgagggagctgcccagagcctgcccaccacctgctgcgtgtctttgcggtggcatttctcgcacacatgccgtgcagtggcacccccaaggatggccattcactaaggcccattgtttttgtcttttcgcttcgtgttttctggcctggtgtttttctcatatacatgtgatccagggataattcccagaattttgacaggattttaagtagcgtttggatcctgctgtttttttttcacttaacatcgggccagttgactcacactctgttttttgttgttgtttttttgagacggagtctcactgtgtcacccaggctgaagtgcagtggcacaatcttggcatactgcaacctctgcttcccaaattcaagcagttttcctgcctcagcctcctgagtagctgggactacaggcacaggccaccacgccctgctaatttttgtatttttagtaaagacagggtttcaccattttggccagcctagtctcgaactcctgacctcaagtgatccgcccacctcggcctcccaaagtgctgggattacaggggactcacactttgtaacaacctgaaacaacgtgatgcatttccctttgggtcttacctgctcttcggtggctgcctgcaggtggagagaccctcccccttgggcccctcgaccttgtttcagaatggggcccctgctgggccagctgtgggtgcctgccacgtgaaggactcattaaggccctgtttaagcctgatgataataaggctttcgtggatttttctctttaagcgactaagcaagtccagagaagaccaccccctgcagggcccagatctgagagaggtactcgggagcctacttcgctgggagcagcctccctttgcgtgtgtggccattcactggcttgtgtttctagagccgggaggacccttttctgcaatgcagggttcacacagggttcgcagcctgaagatggagcagtccgaattctcttccctgtgcagtttgcgcagctgtgtttgtctgatgggctttctaatcctgtgtgctctccttgacttcagggacaatggcattacaggcatgagccaccatgcctggctgtctccctatgtttcagatgaagacataggcttaaggaggtcaggtgacttgcccacgaccactctgtaaataagaggcatgaaaagtatttggagccaccaccaccaagcccactggtcaccctgggtctctgaagtcagggaggcaggaggatgggaggtctgaggaggcagagaggctgagcctggaggccctggaggccgaggccccatctgttgtttccttatgtggaaaataagaggcttcgtttgtcctattgccacagagcgtactacttcaggaacatccaagacatggaaatccgcagggcacggtggctcacgtctataatcccggcactttgggaggttgaggtgggagaatcgcttgaggccagaagttcaagaccagcctgagcaacatagtcagaccccgtctctataaaaaacattatttttaaaaaagacatggaagtcaaattctaaaaactggtgctggctgggtgcggtggctcatgcctataatcccagcactttgggaggccgaggcgggtggatcacctgaggtcaggagttcaagaccagcctggccaacatggtaaaacctctactaaagaaatctttactgaaaatacaaaaatccagtctctactaaaataagtctctactaaaaatacaaaaattagccaggcgtggtgctgcacacctgtaatatcagctactcgggaggctgaggcaggagactcgcttgatcccatgcagcggaggttgcagtgagccgagatcacgccattgcactccagcctgggcatcagaataagactccgtctcaaaaaaaaaaccacaaaaaaacaaaacaacaacaaaagaaaactagtgcttattcgtcactggccaagctgcccattggctacatgggtgcttcaaagagctgcccttctccaggtctggccagcaggtatgtgttacagcaaatgcctggggcagcggcaggggcattgctgcgggaagcttctggacttgcaggaaagctaagttctcagactgcaggggagctaagcacacctcggcacagggtgaggcctgcggttctcagacttcagtctttgtggagcttgagaaaaatgaggctttgcaggtcccacccctagagattctgctctatccactcttgaaggggatcgagaaatttgcattttgcaactcccactttcctccttgaaagctccggagattctgacgcagggttccgtgggccacactttggaaaatacagacccatgagatagaataccagactgttgaagtgtaacgggggcctgggaagtgcagtaacagaagcaagtttgagggtaaaggacacccagaggagggagggacagcatctgcatggagaggagaagagaccccccagcagcttccagggtgttggaagggtgcgctagtaactgctatgcatggcaggtggggaactgtacgtcagggcacagcagcatgaagcggtatggctcgtgtggacagctagggacaggcaggcgtggagcaggcatcctgttctgaaggccaaatcccacagaggagccagggtgctggcaggagccctgaactagccgaacagctgaacagctgaacattcaccctgtggggaaagggtcagaagcgtccaggcttgagggcacagctgggtctcgtcactgcatcacccttatttaggataaaggccctgaagaattgtattagaggttggcaaagcatatctaccacctcctggagccacgctggccgcagggattataattatttccattttcaaattaaggcctctgagctcagagaggggaagttacttgtctgaggccacacagcttgttggagcccatctcttgacccaaagactgtggagccgagttggccacctctctgggagcgggtattggatggtggttgatggttttccattgctttcctgggaaaggggtgtctctgtccctaagcaaaaaggcagggaggaagagatgcttccccagggcagccgtctgctgtagctgcgcttccaacctggcttccacctgcctaacccagtggtgagcctgggaatggacccacgggacaggcagcccccagggccttttctgaccccacccactcgagtcctggcttcactcccttccttccttcccaggtgaacctccaaaatcaggggatcgcagcggctacagcagccccggctccccaggcactcccggcagccgctcccgcaccccgtcccttccaaccccacccacccgggagcccaagaaggtggcagtggtccgtactccacccaagtcgccgtcttccgccaagagccgcctgcagacagcccccgtgcccatgccagacctgaagaatgtcaagtccaagatcggctccactgagaacctgaagcaccagccgggaggcgggaaggtgagagtggctggctgcgcgtggaggtgtggggggctgcgcctggaggggtagggctgtgcctggaagggtagggctgcgcctggaggtgcgcggttgagcgtggagtcgtgggactgtgcatggaggtgtggggctccccgcacctgagcacccccgcataacaccccagtcccctctggaccctcttcaaggaagttcagttctttattgggctctccactacactgtgagtgccctcctcaggcgagagaacgttctggctcttctcttgccccttcagcccctgttaatcggacagagatggcagggctgtgtctccacggccggaggctctcatagtcagggcacccacagcggttccccacctgccttctgggcagaatacactgccacccataggtcagcatctccactcgtgggccatctgcttaggttgggttcctctggattctggggagattgggggttctgttttgatcagctgattcttctgggagcaagtgggtgctcgcgagctctccagcttcctaaaggtggagaagcacagacttcgggggcctggcctggatccctttccccattcctgtccctgtgcccctcgtctgggtgcgttagggctgacatacaaagcaccacagtgaaagaacagcagtatgcctcctcactagccaggtgtgggcgggtgggtttcttccaaggcctctctgtggccgtgggtagccacctctgtcctgcaccgctgcagtcttccctctgtgtgtgctcctggtagctctgcgcatgctcatcttcttataagaacaccatggcagctgggcgtagtggctcacgcctataatcccagcactttgggaggctgaggcaggcagatcacgaggtcaggagttcgagaccaacctgaccaacagggtgaaacctcgtctctactaaaaatacaaaaatacctgggcgtggtggtggtgcgcgcctataatcccagctactcaggaggctgaggcaggagaatcgcttgaacccaggaggcagaggttgcagtgagccgagatagtgccactgcactccagtttgagcaacagagcgagactctgtctcaaaacaaaataaaacaaaccaaaaaaacccaccatggcttagggcccagcctgatgacctcatttttcacttagtcacctctctaaaggccctgtctccaaatagagtcacattctaaggtacgggggtgttggggaggggggttagggcttcaacatgtgaatttgcggggaccacaattcagcccaggaccccgctcccgccacccagcactggggagctggggaagggtgaagaggaggctgggggtgagaaggaccacagctcactctgaggctgcagatgtgctgggccttctgggcactgggcctcggggagctagggggctttctggaaccctgggcctgcgtgtcagcttgcctcccccacgcaggcgctctccacaccattgaagttcttatcacttgggtctgagcctggggcatttggacggagggtggccaccagtgcacatgggcaccttgcctcaaaccctgccacctccccccacccaggatcccccctgcccccgaacaagcttgtgagtgcagtgtcacatcccatcgggatggaaatggacggtcgggttaaaagggacgcatgtgtagaccctgcctctgtgcatcaggcctcttttgagagtccctgcgtgccaggcggtgcacagaggtggagaagactcggctgtgccccagagcacctcctctcatcgaggaaaggacagacagtggctcccctgtggctgtggggacaagggcagagctccctggaacacaggagggagggaaggaagagaacatctcagaatctccctcctgatggcaaacgatccgggttaaattaaggtccggccttttcctgctcaggcatgtggagcttgtagtggaagaggctctctggaccctcatccaccacagtggcctggttagagaccttggggaaataactcacaggtgacccagggcctctgtcctgtaccgcagctgagggaaactgtcctgcgcttccactggggacaatgcgctccctcgtctccagactttccagtcctcattcggttctcgaaagtcgcctccagaagccccatcttgggaccaccgtgactttcattctccagggtgcctggccttggtgctgcccaagaccccagaggggccctcactggcctttcctgccttttctcccattgcccacccatgcacccccatcctgctccagcacccagactgccatccaggatctcctcaagtcacataacaagcagcacccacaaggtgctcccttccccctagcctgaatctgctgctccccgtctggggttccccgcccatgcacctctgggggcccctgggttctgccataccctgccctgtgtcccatggtggggaatgtccttctctccttatctcttcccttcccttaaatccaagttcagttgccatctcctccaggaagtcttcctggattcccctctctcttcttaaagcccctgtaaactctgaccacactgagcatgtgtctgctgctccctagtctgggccatgagtgagggtggaggccaagtctcatgcatttttgcagcccccacaagactgtgcaggtggccggccctcattgaatgcggggttaatttaactcagcctctgtgtgagtggatgattcaggttgccagagacagaaccctcagcttagcatgggaagtagcttccctgttgaccctgagttcatctgaggttggcttggaaggtgtgggcaccatttggcccagttcttacagctctgaagagagcagcaggaatggggctgagcagggaagacaactttccattgaaggcccctttcagggccagaactgtccctcccaccctgcagctgccctgcctctgcccatgaggggtgagagtcaggcgacctcatgccaagtgtagaaaggggcagatgggagccccaggttatgacgtcaccatgctgggtggaggcagcacgtccaaatctactaaagggttaaaggagaaagggtgacttgacttttcttgagatattttgggggacgaagtgtggaaaagtggcagaggacacagtcacagcctcccttaaatgccaggaaagcctagaaaaattgtctgaaactaaacctcagccataacaaagaccaacacatgaatctccaggaaaaaagaaaaagaaaaatgtcatacagggtccatgcacaagagcctttaaaatgacccgctgaagggtgtcaggcctcctcctcctggactggcctgaaggctccacgagcttttgctgagacctttgggtccctgtggcctcatgtagtacccagtatgcagtaagtgctcaataaatgtttggctacaaaagaggcaaagctggcggagtctgaagaatccctcaaccgtgccggaacagatgctaacaccaaagggaaaagagcaggagccaagtcacgtttgggaacctgcagaggctgaaaactgccgcagattgctgcaaatcattgggggaaaaacggaaaacgtctgttttcccctttgtgcttttctctgttttcttctttgtgcttttctctgttttcaggatttgctacagtgaacatagattgctttggggccccaaatggaattattttgaaaggaaaatgcagataatcaggtggccgcactggagcaccagctgggtaggggtagagattgcaggcaaggaggaggagctgggtggggtgccaggcaggaagagcccgtaggccccgccgatcttgtgggagtcgtgggtggcagtgttccctccagactgtaaaagggagcacctggcgggaagagggaattcttttaaacatcattccagtgcccgagcctcctggacctgttgtcatcttgaggtgggcctcccctgggtgactctagtgtgcagcctggctgagactcagtggccctgggttcttactgctgacacctaccctcaacctcaaccactgcggcctcctgtgcaccctgatccagtggctcattttccactttcagtcccagctctatccctatttgcagtttccaagtgcctggtcctcagtcagctcagacccagccaggccagcccctggttcccacatcccctttgccaagctcatccccgccctgtttggcctgcgggagtgggagtgtgtccagacacagagacaaaggaccagcttttaaaacattttgttggggccaggtgtggtggctcacacctaatcccaacacctggggaggccaaggcagaaggatcacttgagtccaggagttcaagaccagcctgggcaacatagggagaccctgtctctacaattttttttttaattagctgggcctgttggcactctcctgtagttccagctactctagaggctgaggtgggaggactgcttgagcctgggaggtcagggctgcaatgagccatgttcacaccactgaacgccagcctgggcgagaccctgtatcaaaaaagtaaagtaaaatgaatcctgtacgttatattaaggtgccccaaattgtacttagaaggatttcatagttttaaatacttttgttatttaaaaaattaaatgactgcagcatataaattaggttcttaatggaggggaaaaagagtacaagaaaagaaataagaatctagaaacaaagataagagcagaaataaaccagaaaacacaaccttgcactcctaacttaaaaaaaaaaatgaagaaaacacaaccagtaaaacaacatataacagcattaagagctggctcctggctgggcgcggtggcgcatgcctgtaatcccaacactttgggaggccgatgctggaggatcacttgagaccaggagttcaaggttgcagtgagctatgatcataccactacaccctagcctgggcaacacagtgagactgagactctattaaaaaaaaaatgctggttccttccttatttcattcctttattcattcattcagacaacatttatggggcacttctgagcaccaggctctgtgctaagagcttttgcccccagggtccaggccaggggacaggggcaggtgagcagagaaacagggccagtcacagcagcaggaggaatgtaggatggagagcttggccaggcaaggacatgcagggggagcagcctgcacaagtcagcaagccagagaagacaggcagacccttgtttgggacctgttcagtggcctttgaaaggacagcccccacccggagtgctgggtgcaggagctgaaggaggatagtggaacactgcaacgtggagctcttcagagcaaaagcaaaataaacaactggaggcagctggggcagcagagggtgtgtgttcagcactaaggggtgtgaagcttgagcgctaggagagttcacactggcagaagagaggttggggcagctgcaagcctctggacatcgcccgacaggacagagggtggtggacggtggccctgaagagaggctcagttcagctggcagtggccgtgggagtgctgaagcaggcaggctgtcggcatctgctggggacggttaagcaggggtgagggcccagcctcagcagcccttcttggggggtcgctgggaaacatagaggagaactgaagaagcagggagtcccagggtccatgcagggcgagagagaagttgctcatgtggggcccaggctgcaggatcaggagaactggggaccctgtgactgccagcggggagaagggggtgtgcaggatcatgcccagggaagggcccaggggcccaagcatgggggggcctggttggctctgagaagatggagctaaagtcactttctcggaggatgtccaggccaatagttgggatgtgaagacgtgaagcagcacagagcctggaagcccaggatggacagaaacctacctgagcagtggggctttgaaagccttggggcggggggtgcaatattcaagatggccacaagatggcaatagaatgctgtaactttcttggttctgggccgcagcctgggtggctgcttccttccctgtgtgtattgatttgtttctcttttttgagacagagtcttgctgggttgcccaggctggagtgcagtggtgcgatcatagctcactgcagccttgaagtcctgagctcaagagatccttccacctcagcctcctgagtagttgggaccacaggcttgcaccacagtgcccaactaatttcttatattttttgtagagatggggtttcactgtgtcgcccaggatggtcttgaactcctgggctcaagtgatcctcctgcctcagcctcgcaaattgctgggattacaggtgtgagccaccatgcccgaccttctctttttaagggcgtgtgtgtgtgtgtgtgtgtgtgggcgcactctcgtcttcaccttcccccagccttgctctgtctctacccagtcacctctgcccatctctccgatctgtttctctctccttttacccctctttcctccctcctcatacaccactgaccattatagagaactgagtattctaaaaatacattttatttatttattttgagacagagtctcactctgtcacccaggctggagtgcagtggtgcaatctcggctcactgcaacctccgcctcccaggttgaagcaactctcctgcctcagcctccctagtagctgggattacaagcacacaccaccatgcctagcaaatttttatatttttagtagaggaggggtgtcaccatgtttgccaagctggtctcaaactcctggcctcaggtgatctgcctaccttggtctcccaaagtgctgggattacaggtgtgagccaccacgcctgcccttaaaaatacattatatttaatagcaaagccccagttgtcactttaaaaagcatctatgtagaacatttatgtggaataaatacagtgaatttgtacgtggaatcgtttgcctctcctcaatcagggccagggatgcaggtgagcttgggctgagatgtcagaccccacagtaagtggggggcagagccaggctgggaccctcctctaggacagctctgtaactctgagaccctccaggcatcttttcctgtacctcagtgcttctgaaaaatctgtgtgaatcaaatcattttaaaggagcttgggttcatcactgtttaaaggacagtgtaaataattctgaaggtgactctaccctgttatttgatctcttctttggccagctgacttaacaggacatagacaggttttcctgtgtcagttcctaagctgatcaccttggacttgaagaggaggcttgtgtgggcatccagtgcccaccccgggttaaactcccagcagagtattgcactgggcttgctgagcctggtgaggcaaagcacagcacagcgagcaccaggcagtgctggagacaggccaagtctgggccagcctgggagccaactgtgaggcacggacggggctgtggggctgtggggctgcaggcttggggccagggagggagggctgggctctttggaacagccttgagagaactgaacccaaacaaaaccagatcaaggtctagtgagagcttagggctgctttgggtgctccaggaaattgattaaaccaagtggacacacacccccagccccacctcaccacagcctctccttcagggtcaaactctgaccacagacatttctcccctgactaggagttccctggatcaaaattgggagcttgcaacacatcgttctctcccttgatggtttttgtcagtgtctatccagagctgaagtgtaatatatatgttactgtagctgagaaattaaatttcaggattctgatttcataatgacaaccattcctcttttctctcccttctgtaaatctaagattctataaacggtgttgacttaatgtgacaattggcagtagttcaggtctgctttgtaaatacccttgtgtctattgtaaaatctcacaaaggcttgttgccttttttgtggggttagaacaagaaaaagccacatggaaaaaaaatttcttttttgtttttttgtttgcttgtttttttgagacagagtttcactctgtcgcccaggctggagtgcagtggtgcgatctccgcccactgcaagctccacctcccgggttcatgctattctcctgtctcagcctcccaagtagctgggactgcaggtgcccgccaccacacctggctaatttttttgtatttttagtagagacggggtttcaccgtgttagccaggatggtctcaatctcctgacctcgtcatctgcctgcctcggcctcccaaagtgctgagattacaggcgtgagccaccgtgcccggccagaaaaaaacatttctaagtatgtggcagatactgaattattgcttaatgtcctttgattcatttgtttaatttctttaatggattagtacagaaaacaaagttctcttccttgaaaaactggtaagttttctttgtcagataaggagagttaaataacccatgacatttccctttttgcctcggcttccaggaagctcaaagttaaatgtaatgatcactcttgtaattatcagtgttgatgcccttcccttcttctaatgttactctttacattttcctgctttattattgtgtgtgttttctaattctaagctgttcccactcctttctgaaagcaggcaaatcttctaagccttatccactgaaaagttatgaataaaaaatgatcgtcaagcctacaggtgctgaggctactccagaggctgaggccagaggaccacttgagcccaggaatttgagacctgggctgggcagcatagcaagactctatctccattaaaactatttttttttatttaaaaaataatccgcaaagaaggagtttatgtgggattccttaaaatcggagggtggcatgaattgattcaaagacttgtgcagagggcgacagtgactccttgagaagcagtgtgagaaagcctgtcccacctccttccgcagctccagcctgggctgaggcactgtcacagtgtctccttgctggcaggagagaatttcaacattcaccaaaaagtagtattgtttttattaggtttatgaggctgtagccttgaggacagcccaggacaactttgttgtcacatagatagcctgtggctacaaactctgagatctagattcttctgtggctgcttctgacctgagaaagttgcggaacctcagcgagcctcacatggcctccttgtccttaacgtggggacggtgggcaagaaaggtgatgtggcactagagatttatccatctctaaaggaggagtggattgtacattgaaacaccagagaaggaattacaaaggaagaatttgagtatctaaaaatgtaggtcaggcgctcctgtgttgattgcagggctattcacaatagccaagatttggaagcaacccaagtgtccatcaacagacaaatggataaagaaaatgtggtgcatatacacaatggaatactattcagccatgaaaaagaatgagaatctgtcatttgaaacaacatggatggaactggaggacattatgttaagtgaaataagccagacagaaggacagacttcacatgttctcacacatttgtgggagctaaaaattaaactcatggagatagagagtagaaggatggttaccagaggctgaggagggtggaggggagcagggagaaagtagggatggttaatgggtacaaaaacgtagttagcatgcatagatctagtattggatagcacagcagggtgacgacagccaacagtaatttatagtacatttaaaaacaactaaaagagtgtaattggactggctaacatggtgaaaccccgtctctactaaaaatacaaaaattagctgggcatggtggctcacgcctgtaatcccagcactttgggaggccgaggcgggccgatcacgaggtcaggagatcgagaccatcctagctaacatggtgaaaccccgtctctactacaaatacaaaaaaaagaaaaaattagccgggcatggtggtgggcgcctgtagtcccagctactcgggaggctgaggcaggagaatggcgtgaacccgggaggcggagcttgcagtgagccgagatcgcgccactgcactccagcctgggcgacaaggcaagattctatctcaaaaaaataaaaataaaataaaataaaataataaaataaaataaaataaaataaaataaataaaataaaataaaatgtataattggaatgtttataacacaagaaatgataaatgcttgaggtgatagataccccattcaccgtgatgtgattattgcacaatgtatgtctgtatctaaatatctcatgtaccccacaagtatatacacctactatgtacccatataaatttaaaattaaaaaattataaaacaaaaataaataagtaaattaaaatgtaggctggacaccgtggttcacgcctgtaatcccagtgctttgtgaggctgaggtgagagaatcacttgagcccaggagtttgagaccggcctgggtgacatagcgagaccccatcatcacaaagaatttttaaaaattagctgggcgtggtagcacataccggtagttccagctacttgggagaccgaggcaggaggattgcttgagcccaggagtttaaggctgcagtgagctacgatggcgccactgcattccagcctgggtgacagagtgagagcttgtctctattttaaaaataataaaaagaataaataaaaataaattaaaatgtaaatatgtgcatgttagaaaaaatacacccatcagcaaaaagggggtaaaggagcgatttcagtcataattggagagatgcagaataagccagcaatgcagtttcttttattttggtcaaaaaaaataagcaaaacaatgttgtaaacacccagtgctggcagcaatgtggtgaggctggctctctcaccagggctcacagggaaaactcatgcaacccttttagaaagccatgtggagagttgtaccgagaggttttagaatatttataactttgacccagaaattctattctaggactctgtgttatgaaaataacccatcatatggaaaaagctcctttcagaaagaggttcatgggaggctgtttgtattttttttttctttgcatcaaatccagctcctgcaggactgtttgtattattgaagtacaaagtggaatcaatacaaatgttggatagcaggggaacaatattcacaaaatggaatgggacatagtattaaacatagtgcttctgatgaccgtagaccatagacaatgcttaggatatgatatcacttcttttgttgttttttgtattttgagacgaagtctcattctgtcacccaggctggagttcagtggcgccatctcagctcactgcaacctccatctcccgggttcaagctattctccttcctcaacctcccgagtagctgggttgcgcaccaccatgcctggctaacttttgtatttttagtacagacggggtttcaccacgttggccaggctgctcttgaactcctgacgtcaggtgatccaccagccttgacctcccaaagtgctaggattacaggagccactgtacccagcctaggatatgatatcacttcttagagcaagatacaaaattgcatgtgcacaataattctaccaagtataggtatacaggggtagttatatataaatgagacttcaaggaaatacaacaaaatgcaatcgtgattgtgttagggtggtaagaaaacggtttttgctttgatgagctctgttttttaaaatcgttatattttctaataaaaatacatagtcttttgaaggaacataaaagattatgaagaaatgagttagatattgattcctattgaagattcagacaagtaaaattaaggggaaaaaaaacgggatgaaccagaagtcaggctggagttccaaccccagatccgacagcccaggctgatggggcctccagggcagtggtttccacccagcattctcaaaagagccactgaggtctcagtgccattttcaagatttcggaagcggcctgggcacggctggtccttcactgggatcaccacttggcaattatttacacctgagacgaataaaaaccagagtgctgagattacaggcatggtggcttacgcttgtaatcggctttgggaagccgaggtgggctgattgcttgagcccaggagtttcaaactatcctggacaacatagcatgacctcgtctctacaaaaaatacaaaaaatttgccaggtgtggtggcatgtgcctgtggtcccagctacttgggaggctgaagtaggagaatcccctgagccctgggaagtcgaggctgcactgagccgtgatggtgtcactgcactccagcctgggtgacaaagtgagaccctatctcacaaagaaaaaaaacaaaacaaaaaacccaaagcacactgtttccactgtttccagagttcctgagaggaaaggtcaccgggtgaggaagacgttctcactgatctggcagagaaaatgtccagtttttccaactccctaaaccatggttttctatttcatagttcttaggcaaattggtaaaaatcatttctcatcaaaacgctgatattttcacacctccctggtgtctgcagaaagaaccttccagaaatgcagtcgtgggagacccatccaggccacccctgcttatggaagagctgagaaaaagccccacgggagcatttgctcagcttccgttacgcacctagtggcattgtgggtgggagagggctggtgggtggatggaaggagaaggcacagcccccccttgcagggacagagccctcgtacagaagggacaccccacatttgtcttccccacaaagcggcctgtgtcctgcctacggggtcagggcttctcaaacctggctgtgtgtcagaatcaccaggggaacttttcaaaactagagagactgaagccagactcctagattctaattctaggtcagggctaggggctgagattgtaaaaatccacaggtgattctgatgcccggcaggcttgagaacagccgcagggagttctctgggaatgtgccggtgggtctagccaggtgtgagtggagatgccggggaacttcctattactcactcgtcagtgtggccgaacacatttttcacttgacctcaggctggtgaacgctcccctctggggttcaggcctcacgatgccatccttttgtgaagtgaggacctgcaatcccagcttcgtaaagcccgctggaaatcactcacacttctgggatgccttcagagcagccctctatcccttcagctcccctgggatgtgactcaacctcccgtcactccccagactgcctctgccaagtccgaaagtggaggcatccttgcgagcaagtaggcgggtccagggtggcgcatgtcactcatcgaaagtggaggcgtccttgcgagcaagcaggcgggtccagggtggcgtgtcactcatccttttttctggctaccaaaggtgcagataattaataagaagctggatcttagcaacgtccagtccaagtgtggctcaaaggataatatcaaacacgtcccgggaggcggcagtgtgagtaccttcacacgtcccatgcgccgtgctgtggcttgaattattaggaagtggtgtgagtgcgtacacttgcgagacactgcatagaataaatccttcttgggctctcaggatctggctgcgacctctgggtgaatgtagcccggctccccacattcccccacacggtccactgttcccagaagccccttcctcatattctaggagggggtgtcccagcatttctgggtcccccagcctgcgcaggctgtgtggacagaatagggcagatgacggaccctctctccggaccctgcctgggaagctgagaatacccatcaaagtctccttccactcatgcccagccctgtccccaggagccccatagcccattggaagttgggctgaaggtggtggcacctgagactgggctgccgcctcctcccccgacacctgggcaggttgacgttgagtggctccactgtggacaggtgacccgtttgttctgatgagcggacaccaaggtcttactgtcctgctcagctgctgctcctacacgttcaaggcaggagccgattcctaagcctccagcttatgcttagcctgcgccaccctctggcagagactccagatgcaaagagccaaaccaaagtgcgacaggtccctctgcccagcgttgaggtgtggcagagaaatgctgcttttggcccttttagatttggctgcctcttgccaggagtggtggctcgtgcctgtaattccagcactttgggagactaaggcgggaggttcgcttgagcccaggagttcaagaccagcctgggcaacaatgagacccctgtgtctacaaaaagaattaaaattagccaggtgtggtggcacgcacctgtagtcccagctacttgggaggctgaggtgggaggattgcctgagtccgggaggcggaagttgcaaggagccatgatcgcgccactgcacttcaacctaggcaacagagtgagactttgtctcaaaaaacaatcatataataattttaaaataaatagatttggcttcctctaaatgtccccggggactccgtgcatcttctgtggagtgtctccgtgagattcgggactcagatcctcaagtgcaactgacccacccgataagctgaggcttcatcatcccctggccggtctatgtcgactgggcacccgaggctcctctcccaccagctctcttggtcagctgaaagcaaactgttaacaccctggggagctggacgtatgagacccttggggtgggaggcgttgatttttgagagcaatcacctggccctggctggcagtaccgggacactgctgtggctccggggtgggctgtctccagaaaatgcctggcctgaggcagccacccgcatccagcccagagggtttattcttgcaatgtgctgctgcttcctgccctgagcacctggatcccggcttctgccctgaggccccttgagtcccacaggtagcaagcgcttgccctgcggctgctgcatggggctaactaacgcttcctcaccagtgtctgctaagtgtctcctctgtctcccacgccctgctctcctgtccccccagtttgtctgctgtgaggggacagaagaggtgtgtgccgcccccacccctgcccgggcccttgttcctgggattgctgttttcagctgtttgagctttgatcctggttctctggcttcctcaaagtgagctcggccagaggaggaaggccatgtgctttctggttgaagtcaagtctggtgccctggtggaggctgtgctgctgaggcggagctggggagagagtgcacacgggctgcgtggccaacccctctgggtagctgatgcccaaagacgctgcagtgcccaggacatctgggacctccctggggcccgcccgtgtgtcccgcgctgtgttcatctgcgggctagcctgtgacccgcgctgtgctcgtctgcgggctagcctgtgtcccgcgctctgcttgtctgcggtctagcctgtgacctggcagagagccaccagatgtcccgggctgagcactgccctctgagcaccttcacaggaagcccttctcctggtgagaagagatgccagcccctggcatctgggggcactggatccctggcctgagccctagcctctccccagcctgggggccccttcccagcaggctggccctgctccttctctacctgggacccttctgcctcctggctggaccctggaagctctgcagggcctgctgtccccctccctgccctccaggtatcctgaccaccggccctggctcccactgccatccactcctctcctttctggccgttccctggtccctgtcccagcccccctccccctctcacgagttacctcacccaggccagagggaagagggaaggaggccctggtcataccagcacgtcctcccacctccctcggccctggtccaccccctcagtgctggcctcagagcacagctctctccaagccaggccgcgcgccatccatcctccctgtcccccaacgtccttgccacagatcatgtccgccctgacacacatgggtctcagccatctctgccccagttaactccccatccataaagagcacatgccagctgacaccaaaataattcgggatggttccagtttagacctaagtggaaggagaaaccaccacctgccctgcaccttgttttttggtgaccttgataaaccatcttcagccatgaagccagctgtctcccaggaagctccagggcggtgcttcctcgggagctgactgataggtgggaggtggctgcccccttgcaccctcaggtgaccccacacaaggccactgctggaggccctggggactccaggaatgtcaatcagtgacctgccccccaggccccacacagccatggctgcatagaggcctgcctccaagggacctgtctgtctgccactgtggagtccctacagcgtgccccccacaggggagctggttctttgactgagatcagctggcagctcagggtcatcattcccagagggagcggtgccctggaggccacaggcctcctcatgtgtgtctgcgtccgctcgagcttactgagacactaaatctgttggtttctgctgtgccacctacccaccctgttggtgttgctttgttcctattgctaaagacaggaatgtccaggacactgagtgtgcaggtgcctgctggttctcacgtccgagctgctgaactccgctgggtcctgcttactgatggtctttgctctagtgctttccagggtccgtggaagcttttcctggaataaagcccacgcatcgaccctcacagcgcctcccctctttgaggcccagcagataccccactcctgcctttccagcaagatttttcagatgctgtgcatactcatcatattgatcacttttttcttcatgcctgattgtgatctgtcaatttcatgtcaggaaagggagtgacatttttacacttaagcgtttgctgagcaaatgtctgggtcttgcacaatgacaatgggtccctgtttttcccagaggctcttttgttctgcagggattgaagacactccagtcccacagtccccagctcccctggggcagggttggcagaatttcgacaacacatttttccaccctgactaggatgtgctcctcatggcagctgggaaccactgtccaataagggcctgggcttacacagctgcttctcattgagttacacccttaataaaataatcccattttatcctttttgtctctctgtcttcctctctctctgcctttcctcttctctctcctcctctctcatctccaggtgcaaatagtctacaaaccagttgacctgagcaaggtgacctccaagtgtggctcattaggcaacatccatcataaaccaggtagccctgtggaaggtgagggttgggacgggagggtgcagggggtggaggagtcctggtgaggctggaactgctccagacttcagaaggggctggaaaggatattttaggtagacctacatcaaggaaagtgttgagtgtgaaacttgcgggagcccaggaggcgtggtggctccagctcgctcctgcccaggccatgctgcccaagacaaggtgaggcgggagtgaagtgaaataaggcaggcacagaaagaaagcacatattctcggccgggcgctgtggctcacgcctgtaattccagcactttgggaggccaaggtgggtggatcatgaggtcaggagattgagaccatcctggctaacacagtgaaaccccgtctctactaaaaatacaaaaaattagccgggcgtggtggtgggcgcctgtagtcccagctactccggaggctgaggcaggaaaatggcgtgaacccggaaggcggagcttgcagtgagcggagtgagcagagatcgcgccactgcactccagcctgggcgacagagcgagactccgtctcaaaaaaaaaaagcacatgttctcgcttctttgtgggatccaggagatagagaatagaaggatggttaccagaggctgggaagggtagtgaggggatggtggggggatggtcaatgggtacaaaaaaaatagaataagacctagtatttgatagtgcaacagggtgactatagtcaataataatttaattgtacatttaaaaataactaaaagatagccgggtgcagtggcttacgtctgtaatcccagtactttgggaggctgaggtgggcgtttgagaccagcctggccaacatggtgaaaccccatctctactaaaaatacaaaaattagccaggcatggtggcgggcgcctgtaatcccagctactcgggaggctgaggcaggagaatcacttgaacctgggaggcagaggttgcagtgagccgagatcttgccactgcactccagcctgggtgacagtgaaactccgtctcaaaaataaaaataaaaatacagctgggcacggtggctcacgcctgtaatcccagcactttgggaggccgaggcgagcggatcacaaggtcaggagatatagaccatcctggctaacacggtgaaacccggtctctactaaaaatacaaaaaattagccaggcgtggtggcaggtgcctatagtcccagctactcacaaggctgaggcaggagaatggcatgaacctgggaggcggagcttgcagtgagccgagattgtgccactgcactccagcctgggcgagagagtgagactccgtctcaaaacaaaaacaaaaacaaaaacaaaaacaaacacacaacaaaaacctaaaagaatataaatggattgtttgtaacacaaaggacaaatgtttgaggggatggataccccattttccatgatgtgattattatacattgtgtgtctgtatcaaaacatctcatgagccccataaatatatacacctaactatgtacccacaaaaattaaaaaaatatattttttaaggtgaagagggaggcgagatgctggccttaacccctaacccgttgttctccctgcaagctgtccacagggcctctcagactcgaggttcagctatatggatgcatgagcttggtccccagccaacatgggagacacttcaccatcggcagcagctacagcacaggaaccctgggtcactgccatgtcccctctgtgactttgtttaaacagaaaatgatgctctgggccggctgtggtggcccacacctataatcccagcaccttgggaggcgggggtgggcagattgcctgaggtcaggagttggagatcagcctggccgacatggcgaaaccccatgtctactaaaaatacaaaaactagccaggcatggtggcacatgcctgtaatcccagctacttgggaggctgaagcaggagaatcacttgaacccaggaggcagaggctgagtgagccaagatcgtgccaatgcactccagcttgggtgagggagtgagactccgtctcaaaaaaaaaaaaaaagaaagaaaaagaaaagaaagtgatcctactggaaccatgcttactcccctccccacctcacactgtgtagaaattagtgctgtcggccaggcgcggtggctcatgcctgtaatcgcagcactttgggaggccaaggcaggcggatcacgaggtcaggagatcaagaccatcctggctaacacagtgaaaccctgtctctactaaaaatacaaaaaattagccgggcatggtggcaggcacctgtagtcccaactacttgggaggctgaggcaggagaatggcatgaacctgggaggcggagcttgcagtgagccaagatcgcgccactgcataccagcctaggtgacagagtgagactcagcaaaaaaagaaagaaagaaagaaagaaatcagtgctgtctatacttctttctgcagtgatggaaatattctgtatctgtgctgtccagtatagtagccactagctacatgtggcacttgaaacatggctggtacagttgaggaagagtggctgccatatcggacgacacagctatagattctgtcaccccaccccgagagtccagagcggggacttctgccttaggccctattcagggctgatttttacttgaacccttactgtgggaagagaaggccatgagaagttcagtctagaatgtgactccttattttctggctcccttggacactttgtgggatttagtctccctgtggaaagtattccacaagtggtgccaccaccccagctgtgagagcagctgggagctgcttttgtcatctttccctggaaagtcctgtgggctgtctcttcctcatgccttgtcccatgcttgggcatggtgtcaagcgtcaggagggagaaagggtccttatttatttatttagagagggacccttcttctgttcccaggctggagtgcagtggtgcgatctcggctcactgcaacctccgcctcctgggttcaagtgattctcctgcctcagcctcctgagtagctgagattacaggcacatgccaacatgcctggctaattttttttttttttttttttttttttttttgagatggagttgtactctcattgcccaggctggaatgtaatggcacaatctcggctcactgcaacctccacctcctggattcaagcaattctcctgtctcagcttcccaagtagctgggattacaggtgcccgccaccatgctcaactaatttttgtattttttttttagtagagacgaggtttcaccatgttggtcagactggtctcaaactcctgacctcaggtgatccacctgcctcggcctcccaaagtgctaggattacaggcatgagccaccacgcccggcctgaaagggttcttatttagtgtgcattttgacattcaatttaattccaaggtcttgtggggtcatggtttacaggatgttgatatagaaaagacttcacttaatgggccgggcgcagtggctcatgcctgtaatcccagcactttgggaggccgaggcaggcagatcaggaggtcaggagattgagaccatcctggctaacacagtgaaaccccatctctactgaaaatacaaaaaattagctgggcgtggtggcaggcacctgtagtcccagccactcggttggctgaggcaggagaatggcatgaacccgggaggcggagcttgcagtgagcagagaccatgccactgcactccagcctgggcgacagagcaagactctgtctcaagaaaaaaaaaaaaaaaacagactttacttactggaagccaaccaatgtatatttagagtaatttttcctgggctgagctgtcatttacttttgcagtatctcaagaagaagagtttacagtgtaaatatttgatgcacactttgattatatagatgaagcaaactattttcaagagctttgcaaggacttacttgtatccaaacaccattctaaaggagtcttacctacttctaaaggctggtctctacttggaaccacttgcttggccctggttcaagtcctgctgcaaacctggaagtcctgtcattgtcttcttccctccagagcagtggcacccaatctaatttttgctgtgccccagcagcccctggcactttgccctgtagactgcagacctcatgtaatgtatgttaagtccacagaaccacagaagatgatggcaagatgctcttgtgtgtgttgtgttctaggaggtggccaggtggaagtaaaatctgagaagcttgacttcaaggacagagtccagtcgaagattgggtccctggacaatatcacccacgtccctggcggaggaaataaaaaggtaaagggggtagggtgggttggatgctgcccttgggtatatgggcattaatcaagttgagtggacaaaggctggtccagttcccagaggaggaaaacagaggcttctgtgttgactggctggatgtgggccctcagcagcatccagtgggtctccactgcctgtctcaatcacctggagctttagcacgtttcacacctgggccccaacctggagaggctgaccaatgggtctcaggggcagctcggttgctggagtttttgtttttatttatttttatgtatttaaggcagggtctctgtattagtccattctcacactgctaataaagacatacccaagactgggtaatttataaaggaaagaggtttaatggactcacagttccacatggctggggaggcctcaaaatcatggcggaaggcaaaggagaagcaaaggcatttcttacatggcgacaggcaagagagcgtgtgcaggggaactcccatttataaaaccatcagacctcatgagatttattcactatcatgagaacagcatgggaaagacccgcccccatgattcagttacctcccactgggtccctcccatgacacatggaattatgggagctacaattcaagatgagatttgggtggggacacagccaaaccatatcagtctccctctgtcatccaggctggagtgcactggcatgatctcggctcactgcagcctctacctccctgggtcaggtgatcttcccacctcagcctcccaggtagctggaactacaggtacctgccactatgcctggctaaatattttgtatttcctgtggagacgaggttttgccacgttgcccaggctggtcttgaactcctgaggtcaagcaatatgcccacctcggcctcccaaggtgctgggattacaggtgtgagccacagtgctcggcctaagtcactgcagtttttaaagctcccaggtgattcttcagtgcagtcaaaagtgagaactggctgggtgcggtggctcatgcctgtaatcccagcaccttgggaggcgaaggtgggcagatggcttgaggtcaggagttcaagaccagcctggccaacatggtaaaaccccatctctactaaaaatacaaaagttagctgggtgtggtggtgcgtgcctgtaatcccagctacttgggaggctgaggcatgagaattgcttgaacccaggggacagaggttgtagtgagccgagatcgtgccactgcactccagcctgggcaacagagtgagattccatctcacaaaaaaaaaaaaaaaagcgagaaccactgtcctaggccctgatgtttgcaggcaactaaaaaaggaagtggacatccccagtcagctgtggcgcaccaagaacaagtcatgggaacataacctaattttctaaatgggttactaggcacttagagcaaaacaatgatgccgaaatcctgatttcagcaaagcctctgcctgcctgtcttggaagtatccacatgaggctgctggggccttggtgtccccagcagtttctagtctctaggtcttgctgtgggtgtctgtgcagtgagggtgtgtgtggcgctgggtgagctctgtctaggcctggcacaggatgcggtctggtagctgctgcttctcttctgcagaagcgcagccaagcaccctctggggtttcaggcccacacccagcctgaagttctgggagtggctcactttccaaccttcagggtctcccagcagctgactggggagtggtggagggaaaagggattgtattagtccgttttcacgccgctgatgaagacatacccgatactgggcagtctaaaagatagaggtctgatggactcacagttccacgtgactggggaggcctgacaatcatggtggaaggtgaaaggcttgtctcacacggtggcagacaagagaaaagagcttgtgcaggggaactcccctttataaaaccatcagatctcgggagacttattcactatcatgagaacagcacgggaaagaccctcctctatgattcaattacctcccaccaggtccctcccacaacatgtaggaattgtgggaactacaattcaagatgacatttgggtggggacacagccaaaccatatcagggcgtcccagaaagggtatagggtctgagacccaagtcagcatgagaaagtatgcttctcatggtggcccagttgggtggaagtggcagccgggccgtctttccaccaggccactcaagtagcagctgagagacccctgccctggccagtccccgccctcccctcttgccactgcctctggttctgaacagatgggcaccctcatcttgtatttgtgattaatgtctaacaatgtagttttgtgagaagggtttgctgatacagccttgctgcagatgctgcgaactgtggcctggggcagaccttacctccagacacgccctgaggcaggggagggcactggcccgtagctggccgagagctctcgggttgcgcgacagggatacttttcagcggctgggtcgctatccaaagtgagaaaacgaggagggaccaggaggctgtccgcctcaagagatgtgggggccaggtccagttatctggggaagcagtaagcttctctgctgtttctaaccccaggcctcccctggtctaaggcagggcctcccagcctcggggcactttaaagatatctgggcctggccccatccccacagtctgactgagtgggtctggatagggcctgagcattggtgatttcctgggtgaaaggaggcccctcacagtctctggaagcttctctgtgttaggaaaagctctgggcttgactctgctttgaaagtcaagatccgcaaatcctctcagcctcagtttctccttcagcaagatgaaatggaaatgctgtacctacgtcccggggtggttgtgagacccaaaaaagacaatgttctggaaggttcctggtgcgttgcagtcctctaagaacctgagttagagccacgctgagtctcagcttcttggctccttctgtttcaaactcgtccatgtgatagctcaggaagggtaggcagggccctgccccctactcagaaaacaccatcctggtcctggggatccccgcagcattagtcccctgttttcccagtgtattgagaaaaattgctaacaagcagtggggcacaccaccagcctcctgggttcctttcagtttggggatttttggacattcccaggaatgtcttaaaaaacacttcaaaaaacattaacataaatatttttatcaaagcctgtattaaatggtctttcaagaaaatacagtaacaggtcaggcatggtggctcatgcctgtaaccccagcactttgggaggccaaggcaggcagatcacctgaaatcaggagttcaagaccaacctggccaacacagccaaatcccatctctacaaaaaatacaaaaattagctgggtgtggtggcacacacctgtagtcccagctacttgggaggccgaggcaggagaattgcttgatcccggaggcggaggttgcagtgagctgagatcgtgccactgcactccagcgtgggtgacaaggtgaatctttgtctcaaaaaaaaaaaaaaaaaaaagataaaatacagtatacagtaatagagaacaatccttttttcaaagtagtgaccccaaatgaacaaaatatgcatctagcttaaatgcgaacctggttttctctacgcccattcaagcccctgcaataggggcccttcaccccgcatccatggactcctaaaattatatggaaaatggctgtgtgtgagtgtggatggacatgtgcacacatatttttggctttaccagatgctcaaagagcctaggacccaaaaagggctgagaatgaccgtgtcggccacttcagggtcatcaggaattgctgtgcactgctcacttctccagtgaacactttctgcttctgtgtttcctggtatcctttgggactcctggctaggtcatgtgtttctctactttcaaaagggcttcagccaggcacgatggcatgagcctgtagtcccagttgctctggaggttaaggtgggaagattgcttgagcccaggaatttgaggccagcctgggcaagtagataggtagatgattgatagatagatagatagataaatagatggatagataagtcgctagacagtcatccatccacccatccacacataaaaaggcctttgtcatgtcatgttttgtggcccacctgccagtgttgcccacagttgctgcccctccaaactcatcagtcactggcaaacaggaggaatgtgtggctcatgtctgggcatcagtggctgtgggagacatccttgatcttctccagcttctccttccacattttcctttgcaatctggcaatatctattaaaataaaatgtgcatgccttttgacctaagagcttcacttctaggacccacttacacgtgtgtgacatgatgttcatacgggtttatttatctgaggttgttcatacacaccattgcctgtaatcactaaaggcgggagcagcctacacatccatccacagaggagtagatgccttttggtacatccgtggcgacggaatactaagcagcctgtgtatctatacactcacacgtgtttgtttatgtgtggaatatctctggagggtacacaagaaacttaaaatgatcactgtctctggggagggtacctgggtgcctgggaggcaggtcagggaaggagtgggcacaggtattaccaattggaagacaataaaaacaacagctcctggccaggcgcagtggctcacgcctgtaatggcagcactctgagaggctgaggcgggcagattgcttgcgtccaggagttcaagaccagcctgggcaacatagcaaaaccccgtttctattaaaaatacaaaaaattagccaggtgtggtggcatgcacctgtaatcccagctactcgggaggctgaggtgggagaatcacctgagcctgggaggtcaaggctgcagtgaggtgagattgtgccaccgcactctagcctgggcgatagagcaagaccctgtctcaaaaacaaacaaaaaacagtccctggcactctgggccaggcctggcagggcagttggcagggctggtctttctctggcacttcatctcaccctccctcccttcctcttcttgcagattgaaacccacaagctgaccttccgcgagaacgccaaagccaagacagaccacggggcggagatcgtgtacaagtcgccagtggtgtctggggacacgtctccacggcatctcagcaatgtctcctccaccggcagcatcgacatggtagactcgccccagctcgccacgctagctgacgaggtgtctgcctccctggccaagcagggtttgtgatcaggcccctggggcggtcaataattgtggagaggagagaatgagagagtgtggaaaaaaaaagaataatgacccggcccccgccctctgcccccagctgctcctcgcagttcggttaattggttaatcacttaacctgcttttgtcactcggctttggctcgggacttcaaaatcagtgatgggagtaagagcaaatttcatctttccaaattgatgggtgggctagtaataaaatatttaaaaaaaaacattcaaaaacatggccacatccaacatttcctcaggcaattccttttgattcttttttcttccccctccatgtagaagagggagaaggagaggctctgaaagctgcttctgggggatttcaagggactgggggtgccaaccacctctggccctgttgtgggggtgtcacagaggcagtggcagcaacaaaggatttgaaacttggtgtgttcgtggagccacaggcagacgatgtcaaccttgtgtgagtgtgacgggggttggggtggggcgggaggccacgggggaggccgaggcaggggctgggcagaggggagaggaagcacaagaagtgggagtgggagaggaagccacgtgctggagagtagacatccccctccttgccgctgggagagccaaggcctatgccacctgcagcgtctgagcggccgcctgtccttggtggccgggggtgggggcctgctgtgggtcagtgtgccaccctctgcagggcagcctgtgggagaagggacagcgggtaaaaagagaaggcaagctggcaggagggtggcacttcgtggatgacctccttagaaaagactgaccttgatgtcttgagagcgctggcctcttcctccctccctgcagggtagggggcctgagttgaggggcttccctctgctccacagaaaccctgttttattgagttctgaaggttggaactgctgccatgattttggccactttgcagacctgggactttagggctaaccagttctctttgtaaggacttgtgcctcttgggagacgtccacccgtttccaagcctgggccactggcatctctggagtgtgtgggggtctgggaggcaggtcccgagccccctgtccttcccacggccactgcagtcaccccgtctgcgccgctgtgctgttgtctgccgtgagagcccaatcactgcctatacccctcatcacacgtcacaatgtcccgaattcccagcctcaccaccccttctcagtaatgaccctggttggttgcaggaggtacctactccatactgagggtgaaattaagggaaggcaaagtccaggcacaagagtgggaccccagcctctcactctcagttccactcatccaactgggaccctcaccacgaatctcatgatctgattcggttccctgtctcctcctcccgtcacagatgtgagccagggcactgctcagctgtgaccctaggtgtttctgccttgttgacatggagagagccctttcccctgagaaggcctggccccttcctgtgctgagcccacagcagcaggctgggtgtcttggttgtcagtggtggcaccaggatggaagggcaaggcacccagggcaggcccacagtcccgctgtcccccacttgcaccctagcttgtagctgccaacctcccagacagcccagcccgctgctcagctccacatgcatagtatcagccctccacacccgacaaaggggaacacacccccttggaaatggttcttttcccccagtcccagctggaagccatgctgtctgttctgctggagcagctgaacatatacatagatgttgccctgccctccccatctgcaccctgttgagttgtagttggatttgtctgtttatgcttggattcaccagagtgactatgatagtgaaaagaaaaaaaaaaaaaaaaaaggacgcatgtatcttgaaatgcttgtaaagaggtttctaacccaccctcacgaggtgtctctcacccccacactgggactcgtgtggcctgtgtggtgccaccctgctggggcctcccaagttttgaaaggctttcctcagcacctgggacccaacagagaccagcttctagcagctaaggaggccgttcagctgtgacgaaggcctgaagcacaggattaggactgaagcgatgatgtccccttccctacttccccttggggctccctgtgtcagggcacagactaggtcttgtggctggtctggcttgcggcgcgaggatggttctctctggtcatagcccgaagtctcatggcagtcccaaaggaggcttacaactcctgcatcacaagaaaaaggaagccactgccagctggggggatctgcagctcccagaagctccgtgagcctcagccacccctcagactgggttcctctccaagctcgccctctggaggggcagcgcagcctcccaccaagggccctgcgaccacagcagggattgggatgaattgcctgtcctggatctgctctagaggcccaagctgcctgcctgaggaaggatgacttgacaagtcaggagacactgttcccaaagccttgaccagagcacctcagcccgctgaccttgcacaaactccatctgctgccatgagaaaagggaagccgcctttgcaaaacattgctgcctaaagaaactcagcagcctcaggcccaattctgccacttctggtttgggtacagttaaaggcaaccctgagggacttggcagtagaaatccagggcctcccctggggctggcagcttcgtgtgcagctagagctttacctgaaaggaagtctctgggcccagaactctccaccaagagcctccctgccgttcgctgagtcccagcaattctcctaagttgaagggatctgagaaggagaaggaaatgtggggtagatttggtggtggttagagatatgcccccctcattactgccaacagtttcggctgcatttcttcacgcacctcggttcctcttcctgaagttcttgtgccctgctcttcagcaccatgggccttcttatacggaaggctctgggatctcccccttgtggggcaggctcttggggccagcctaagatcatggtttagggtgatcagtgctggcagataaattgaaaaggcacgctggcttgtgatcttaaatgaggacaatccccccagggctgggcactcctcccctcccctcacttctcccacctgcagagccagtgtccttgggtgggctagataggatatactgtatgccggctccttcaagctgctgactcactttatcaatagttccatttaaattgacttcagtggtgagactgtatcctgtttgctattgcttgttgtgctatggggggaggggggaggaatgtgtaagatagttaacatgggcaaagggagatcttggggtgcagcacttaaactgcctcgtaacccttttcatgatttcaaccacatttgctagagggagggagcagccacggagttagaggcccttggggtttctcttttccactgacaggctttcccaggcagctggctagttcattccctccccagccaggtgcaggcgtaggaatatggacatctggttgctttggcctgctgccctctttcaggggtcctaagcccacaatcatgcctccctaagaccttggcatccttccctctaagccgttggcacctctgtgccacctctcacactggctccagacacacagcctgtgcttttggagctgagatcactcgcttcaccctcctcatctttgttctccaagtaaagccacgaggtcggggcgagggcagaggtgatcacctgcgtgtcccatctacagacctgcagcttcataaaacttctgatttctcttcagctttgaaaagggttaccctgggcactggcctagagcctcacctcctaatagacttagccccatgagtttgccatgttgagcaggactatttctggcacttgcaagtcccatgatttcttcggtaattctgagggtggggggagggacatgaaatcatcttagcttagctttctgtctgtgaatgtctatatagtgtattgtgtgttttaacaaatgatttacactgactgttgctgtaaaagtgaatttggaaataaagttattactctgattaaataaggtctccattcatggattccaaggacaagaaagtcatatagaatgtctattttttaagttctttcccacgcacccttagataatttagctcagaacaggaaatgatagtattaataaaagctggacatcaggattaacagctctctctggggccctgaaggtgagagttctcagacttgctcatttgcagttgcttctttgtgatgctggcaaaccatcctagtcccattcaaagggcaatacaaagccttgtggctgacctcacgatgcagcactcagtttgcaagaccggcaccagtgtatgcaaacctgagaaggttggggatgaggatatgggatctttcatccctggaaatttagtccagaggcctggggctggagcagaacaccaagccaatcagcttaatgaatggcttagattcctgctaggtttgcagagctgccttctttcctttggtaccttattatagattgaggagtatttctgctaaaccaagatagggataaccagatagcatcttcatagcaatgccacaaaggaaaacaaaaacaaaacagtaatccatcatattattccttagtaactatgccaaggtcatgatactgaatccttagattgtttcaaaatactacttttctttgctcttcctgatgtgtttgccaccgcaggcagatgtttaagtaaaacagattttaactgcagctacaaaagcagcaacaggccagcaaaagagaagtgctatctcagagagcatggctttcagagccacaagagacagcctcactggctgtttcagcttgactgccatgcaaagaagagagcagagggagaaccagccccacccacttattcatcttgtacaaaaaaaaagcacctaccagcctaggctacatagtgagacactatctccacaaaaaacccacgaaaactagctgggtatggtggcacatgcctacagtcccagctactggtaaggctgtggtgggaggatctcttgaggccaggaaggagatccaggctgcagtgagccaagattgcaccactgcactccagtctggacaatcgagcaagatcccatctcaaacaataaaaaaaaaaagcgtgtaacctcctcagaagaaagatgttataatctcaggcagcaggcaagaaccaatccaggctctaagcaaattatgtatctcactgaccccaccaaacctcagaaaaatttaacagtgagaagcaaaatctcctttaaagagcaacttagaacagatagaaaatatcatacagctgacttcactagagagaaagtgcatcaactgctttcactcaacaaaaagaaaaaagagatgatcaatgcagatcccctctcctcctggcagcccttaccctcagtgaaaagccaccaccattctctctctggtggccatcagatcaacctgcggcgttcccacaagacagaatggagattttccaaggtatagagcaagtcagagtaccccaaagaacggcggcagagagccagctccgaaactgccaacactaccatgcatacacagttcagtaagtcaagaaaggcctggtacacagcattctgtaacttttttttttatttttttcaatttttccttcttttttttttttaagcactagtctgtgctttgcgaacagaatcaagacattaacaaagatcagcttctctgaagaaaagcatttctatagaacaaagacagctacatgtttcgctgccattacacagctccaaagcaggaaaagaaaatatttacaaaatacaaggttttttttttccattttttgtttttgttttttttttcaatgctaaaagggttattcagaattttcaaccttataaatagaagaagcactttatgcatagggatatggtgcattattgtatttttttttaaagaaacaatgacaaaccctttaacttgcaaacagaaaaaaaaatcactaatgttgaaaattgtgaaaaaaccccaaccattaa
